United States Patent Application Publication US 2026/0258423 A1 - sequence listing, part 54

SEQ ID NO: 301568 - DNA, 83257441 bp, Homo sapiens (residues 32,022,106-34,156,912 of 83,257,441)
  source 1..83257441: mol_type = genomic DNA
gaatcatgaagtgacagttcaacctccaggtgaggatcaagctcattataatttgcccaagtttacagtcaaacctgcagatgtggaggttaccatgacttcagagcctaaaaatgagacagaatctacccaagcccagcaggaggccccaattcagcctcccgaggaggcggaaccttcttctacagccctgaggactacagatcctcctccagaacaccctgaggtgacacttccaccttcagacaagggtcaggctcagcattcacacctgactgaagccacagttcaacctctggacctggagcttagcataactacagagcctactacagaggttaaaccgtctccaaccacggaggaaacctcagctcagcctccagacccggggcttgccataactccagaacccactacagagattggacattccacagccctggagaagactagagctcctcatccagaccaggttcagactctgcatcgaagcctgactgaagtcacaggtccacctacaaagttagaatcttcgcaggattcattggtgcagtctgaaactgcaccagaggaacagaaggcctccacaagcaccaacatatgtgagctctgcacctgcggagatgagactctgtcatgtgttggtctcagcccaaagcagaggctccgccaagtgcctgtgccagagcccgacacctacaatggcatcttcaccaccttgtaagaatcacctttcctcaatcatcctctgtgtcttgcctgacatggcagccttttcctggaggccttcctgggccttctttatctccccaagccatactgacaagtgactttctgctttcacctttgcctgtcaattctcccttctcctcattctcctttaatgttagacccattctccagtcttttactttttctccagtcttttactcttactcgttttcttatccgttcttatttaccccatcacatcattgcttaaccgctgctctgctcctattttcgcttcaccctcttttttttttttttttttgagacagagttttgctcttgttgcacaggctggagtgcaatggcatggtcttggctcaccgcaacctccgtctcccgggttcaagtgattctcctgcctcagcctcctgagttgctgagattacaggcatgcgccaccacacctggctaattttttgtgtttttagtagagacggggtttctccatg[139 bp omitted]agtgatgatgctctaagtggttaagagttgattctggagccaggctgcctgggtttgaacccaggtctgtttattagcttggtgatccagagcaagttattctgctctgtgactcaatttcctccttttaaactggggattatgctagttaccatttcataggattgttgtgaaatttaggtgagtgaatacatggaacacttcatcagtgcctagcatatgtaggagtgttggctgttaacatgattactctgtcctttagttatgtccagaactcctctttgtccctggctttttatatgtagcactcattttgtgtcaaacccaggaccaagtatgctattgtccgcagaacattaaaatgataggagggaagagagagaatacgcataaaaagggcggtgtatataattaattcctgaaagataatgcataccatcggtgctagaatttaccagaatctgtggtccttgaggtgtggagatcagggaaagctacatggataagctaaaagtttacttgggtcttaaagagtacacaatgaggtatggaaagccattgaaagtttccaagcaagagagattaaatgattaaaacaggaagattattttattttattttgttttttttgctttatgttcaagtatagacatgcaaaggattattttagaatccatatgtagagtgcccaaaaggaaaagcttatttcagggagacaaaatagaaaggtctagcaaaatgtaggagtaaagtgtgaaggggctaaatcagatcagttgtaataagagtggaaagaaaaagcctaggatgtttcaagagagggcaaagctttggtgttgcctggcatggggtttctttctacttatttatcgataaagataagcttatgcccatttttctgttgaattatttaccatttttgtgttgatttgtaggagtttgtttagacacataagtgcttttggataaaatacttacattcaaagtaattaactggcatcgtctgtccaagagatgggatggataggaagttaagcttccgggagatgcctcatcatttgtgccagtggccccgcattatttcttgatgaagtgtgcaaactgggaagctgatagctctggaaatgagaaagcaggtgttattttctgtttccgaatatccccgacaaggttgccatgattcttttatttatcctgttcattctttgcgtgcctattcaaggatataaactgtctttctttgcagaaatttccaaggaaactatatttcataccttgatggaaatgtatggaaagcatacagttggaccgagaaactgtgagtatattctctccaaatatgacaaaaaactaactgcattgtaagatccttcttggtccagaattttgaggtccatacctctgagaaaagatatttcccctccataccccaaatcagcctctgtggattgcaatcctatggttattttaaaattaaatttggtaggctctctctaaaataagaagcaatttaaatttattttttatcatacaaataatacatggttatattcttttttttcctcgttttttttttttttttttttttcagagacaaggtcttactttgtcccctgggctggagtgcagtggcataatcacatctcactgcagccttcacctcccaggcacaagtgatcctcccatctcagcctcccaagcagctgggaccacaggtgcatgccaccgcgcccacctaattttgtattttttgtagagacgggctcttcctatgctgcttaggctggtcttgagctcctgggctcaagtgatcctcccaccttggcctcctaaagtgctcatattataggcatgagccaccacccccagcccatgattctatttttaatgtataaaaatgcaataacaggtataacaaaaaccctccttgtgccctactccctcatccctgaggtaatgctactgtgtgtttagtatacatgcttccagacttttccccatttacctacatacatatttacataaagcaaaatagatttgttgtgtggtttttaaaatcttttttcttttcataaagggtaacatcttgcaacttgattctttcacttcatggtatcacttatatgatattctttcacttcataatttctttccttcctaggacttagagggtcaccccattcatttaaactcctgcataatccatagtatggatgcatcatagtttatttaataatttccccattgatgaatgttgagcttatgcttagtgggcaagtattcctgtagcatagatatctagaaatggaagagttggggtgaagactatgtagatataaaattttaattgtcctcaaaaatgttgtgccaactgactatattgtcagcagaatatgacagcattcatttccccacaccttttcactgttgggaatttgccagctttttgttgaagttatggatgaataaaagggattccatccaaatttgaatttttctgatcactcatgaatttaattaaatatctttatatgtttattgaacatttgtgtttcttctctgagttttctgtcctttgttcattttcctgttgaattgttttatcgttttcttcctgatttatagaaggaattagttgagacacataaatgattttggaaaaaatgcttacattcaaagtaacatttttcacaacagtttgtgtcacatcattagtttgacttatatagacaagacatacatgagttctaaattaaaaatcaaacacatgccatgtgcagtggctcacgcctgtaaccccagcacctcgggagttcgaggcaggtggatcacctgaagtcgggagtttgagaccagcctggccaatatggtgaaaccccatctctactgaaaatacagaaattagccaggcatggtggtgggtgcctataatcccatctacttgggaagctgaggcaggagaattgctttatttatttttcgagatggaattttgttcttgttgcccaggctggagttcactggtgcgatcttggctcactgcaagttccacctcccgggttcaagggattctcctgcctcagcctcctgggtagctggaattacaggtgcccgccaccatgcccagctaatttttctattttgagtagagacagagtttcaccatgttggacgggctggtctcgaactcatgatctcaggtgattcatgtgccttggctttccagaatgctgggattacaggcatgagccaccaggccaggccaggactacattttaaaagcaagaaaatcattacaaaagtcagggtagtggttacctattagggttagagagaggaatatgattggaaaggggcacactggggcttctgggatgctagcaataatcttttgtaacaatgtttacatgggtatctgctttataattattaaactgaatatttggccaggtgaggtggctcatgtctgcaatcccaacactttgggaggcagagacaggaggatcacttgagccaggagtctgagaccagtgtgggtaacagaatggaccctgtctcagaaattaaattaaattaaattaaattaaatataaacaacatttatgttatgtgcactttacgcacattgtagttctcaaatttttttgatgggggaaaaatgttgaatggcttcacttgcagccctgacatggtcccatgtggggcttttgtaataaggtttgggagaagagaggaggaaatggaggttctgcagatcttggtgccacccagagatggattctgaaaggtatattatgatctagagaggagtcattaaagatacaatttggtgggaagagtggagcagtgtgcttgtgtgtgtgtgcttgcacgtgtgtgcttgcttgtgtgtgtgtgcttgtgtgtgtgcttgtgtgtgtgtgcttgcatgtgtgtgtgtgcttgcaagtgtgtgtgcgtgcttgcctgtgtgtgtgtgcttgcctgtgtgtgtgtgtgcttgcctgtgtgtgtgcttgtgtgtgggtgtgcttgtgtgtgtgtgcttgcctgtgtgtgtgcttgtgtgtgtgtgtgtgcctgcaaatgtgtgtgtgcgcttgcctgtgtgtgtgtggtggtggtggtggagagggatgaacacaaaaaggaaaatggaagaaaaggtttgaacgaaagcagagcagatcccaccatcttgaaatgaccatgacccagctttcctccacatgcaggagatagtcctgtgtagcaaatagttgtagtttgcattttaacctagaaataactttttcattttccagaattctcagtgaaaattatttgactgaattacctaaggattcatttgaaggcctgctatacctccagtatttgtaagttagttaatcatatttttgagtttttagtcatattatctttaaaatgaataagaggttcaaattagataatctctaagatttcttccagcaataaaattctgcaattctgtaagtttgtatagggtctcagcccatctctagcattagctacatcctatgcattttcagtttttaaattgtatagacaaaatacagacagaaaaaatttcacatggtaagaagatctgagcagtgactgacacccatatgaaccttgttttataagggtttacataccatcttcttctattcagtctacagccagtagatcaaatctaacctaaggtctattttttaatagcctattaagaatggtttttgcatttctaaaggactgtgaaagaaaaaagaaagagaaatatgcgagagagatcatatgtggcccacagagccttaaaatatttactgtctgaccttcacaaaaaacgatttgaaaaagttggtttagtaggatgaaaggaattaaagttaacttcagattgttgcctaaaggagaagaaaatatagaccacctacattcatttgaacatcattaatccagaattttttggtaatttaatcgcattaaattaacatttaaatatttgaaatcagctgaattatagaaataatattatcaagaatattaagctaccaagagaatagactagtattaaggatttcatttcaggaattgttatattaaaacagatgtttaaaatgatggttaagtggtagagctagaaatgtttacagtaagaagcatatcagaaatgcccctaactcttcactaattacacagtaactatctccccagccctgttaccaagaaagggatacctgcatagtatttctgtctgtttagagacaagaagatactatgttcaattgctatgaaagcttgattcttatcctctgtccgcagaggtgtgtatgtcattaatccttattagtgatgctcttttgcagacagattctttcaaatgtgaaaggcttaaggaaagtgggtgtaaagaccctcaagtggatgccaaagtgctacagaggccatgaagtaataaaactacatttgctttaaaataatcattttcctactactcactcccccagctattcatttatttatttatttatttttatttattatttttttttgagacggaatcttgctctgtcacccaggctggagtgctgtggtgcgatctcggctcaccacaagctctgcctccctggttcactccattctcctgcctcaacctcccgagtagctgcaactacaggcacacgccgccatgcccagctaatttattgtatttttagtagagacggggtttcaccttgttagccaggatctcaatatcctgaccttgtaatccacccgcctcagcctcccaaagtgctgggattacaggcatgagccactgcgcccggccagctattcatttgttttacaaatattttaatttactttatttccatgtgtcagttttaaacatggtgggcaatgcagatgatcaagacctagtccatgctttcaaggagtttatgctcagaaaaaatgggatgaacaataactacattaagaagaagaaatggatgtgggcactaggagggataaattgtttctgaagcatagaagaggggaaaatgacttcagtttggacccaggaagctgttactagaacaatcccatttgaataggactttgaagggccattgtgtagcatcggacagacatcttggggacaatattctaaacttgcaaaagggaaatgggagaagggcaaaacacaggaaagtattcgaggaatgccatgagtacctgtagattacaaggagggagagtaggaaattggagccagatcttccagggctttgaatgccaagctgaggagccatcatggggaaccatgttatcacagcagtgctgtaagatggatctgcatcacagtcattgagagggcacgttagaactcagttctggactccgccctcatagttattgattcagttggtctagagtgggaccaagaatttgcatcctcaataatttcccaggaggtgctggtctttgcaagccacttctggagagtttatatgatgactgtgtggaggatagtttaggaagggagagactagagatggagacatcagccagacaacgttacaccatccaggtaaagagggagggaaaagccccatctctgtataactgaagaaactgctttcatgaaatattaaagcaatataaaaccaaaaatgaatttctattaatatgatagaaattaattgtattaatatgatttgaatattagttcaaagttatgtattaagtaaaggggtaacttcctttcaaatgctgttgaaaggatgtcttttatttcttctgatactgaactggcttaggaaaacaaagctaaactaggaaggtgtataaatgtgaggctattcgttttaatattagaaactatatatagagataaaagctttgagctcataatctaggatttgatgagactacaaaagggcatctaatcaagtctactgctctcaggaaaaattaattccaaagtctattaagttgtatattttgtttattaaaagtatgaaggcgagactctaggagaggtacaggcagggttaggagctctggaaagttcaaatacaggtccaaatgtttagagtcgagatgaaaaatgtgtattcaatattattctaaactcttgctattattcataccagtcaacactgataacttatcaaggcaatattttccttttatttttcctagagatttatcctgcaataaaatacgatatattgaaagacaaacatttgaatcactaccatttttgcagtatatgtaagttacaaatataactttattacatttggaatttttataaaacttaattataaacctctttgctattcattttgaaatatgattaaaatttgaccagtagaaaggtactaaaattatatagcaagtccttcttgtctctagcaaagattagtgtgagaattattacacagatcatagtgaatcatcagagagcagtggttctcaactggtgtgattttgtactcaggtgacatttggtaatgtccagagacacttttgcttgacaaaactgtggttgtgctcctggcatctggtgggcagaggccagagatgctgctaaacatcctgcagagtataagacaaacccccacggcaaagagttatatagtccaaaatgtcgatggtactgaagttgtgaaatcctgttctagagaaatgaagatcacttaacacaggtatttactgagcgttcactgttttgtagctaatgcaccacatgtgcaatgttaaagtataaaccataagccagtatcttccacagtgagattgccttagtgcacagagaaaagattgaggtgatgttccatcctatgtaaattagactcacagcaaatgataaatgttctgaaataatttttttttcctttggcttatgtctttttttgtagaaatctgggctgcaatttaattacaaaactgagccttggaacatttcaggcctggcacggaatgcagtttttacacaacttgtaagtgaaatagaagatgaatacgtgtaaacgactattttgtataaaaactcatacaattattggttagctgggtataagcccattatgaactctgaaaagtgtgtcttaagatccattcgtttttctcaaatggggaaactaaggtacaaagcagccaagagacttacacagtttatatatgacctgctctgcttgtcctagttctgacctatggcatgggcaagaaaaggcatcaaacaagtgaccctcaaattagccttgttgctgggcaggtggctcaggcctgtaatcccagaactttaggagctgaggggggcggatcacctgaggtcaggagttcaacaccagcttggccaacatagtgaatccccatccctactgaaaatacaaaaaaattagctgggcgtagtgatgcagttttttgctccctggaggactttgtgttaagctttcttccttgcagctaaatgttgcagacatttaagcagtttgaaactctgcatatgagcaggaatcaaagttaaatccaaagtgtagggctgggcgtagtggctcatgcctataatcccagcaccttgggaggatcacttgaggtcaggagtttgagaccagcctggccaacatggcgaaaccccgtctctactaacgatacaaaaattagcaggtcgtggtggcaggcgcctgtgatcccagctatcgggaggctgagggtcgagaatggcttgaactccagaggtggaagttgcagtgagccgagattgtgccactgcactccaacctcccctccaggctggtctcgaactcctgtgacctcaggtgatctgcccaccttagcctcccaaagtgctggggttacaggcgtgagccaccatgcctggccaaaatggtgtttatgttaagctattgtgcaaaaaaaaattttgtaaagaaaatacatcgctctactttaattccatatactttcctgactactcttctaccgtaagtgcaaaaattctatgatttctctgtataacatacccagcaaatcagagtgggtatattcaatggcctgaaggggactttagactcaaggtgaagattctcctctacatctgactttagaaaatactttccacctttcttgtggttcagaaatctagtttcacacagttcattttgaggtagagggaggtgttcaggatgtgtctggattagagcagcagtttctgcagatgctcctctctgtcttcattaatttgctgatgcttaacttagggaagacacactgagggtctgtttttcttttgccctcacaccagagaacaggctcattaggtccctccaccaagaggtttgggtagcatcaatacaaatgtcttaaactcaccacctttactaagcactttataacagtgggagtcccacatcagaatctggtggccaggagcggtggctcatgcctgtaattccagcacttctgaaggctgaggtgggtggatcacctgaagtcaggagttcgagacaagcctgaccaacatggtgaaaccccgtctgtactaaaaatacaaaaattagctgggtgtggtggcgggcacatgtaatcctagctactcaggaggctgaggcaggagaatcacttgaacccaggaggcggaggttgcagtgagccaaggtcatgccattgcactcaagcctgggcgacagagcaaggctccaacagagatggggttttactacgttggtcaggctggtctggaactcctgacctcagatgatccacccgcctggcttcccaaagtgctgggattataggcctaagccaccaggcccagccaataaatggaaactttaactcaaaagaaggaaggaaggaagggaggaagggagggaggggagggagggaagggagggaagggaaagaaggagggagggagggaaatgaggaaagaaagagaaagaaagaaagaaagaaaagaaaaaattgtaaaaccataaggttaaagtaaaccttttttcttcatacagagtaagcacgtgagttcagattacagctttgcttcttcatagcttggtgacctaggacaagttatgtaacctctctgtgcctcagtttcctcatttataaaatagggcaataataatatctaccacataaggttattgtgaggatgaaatgtgaaatgctgatcacaaatacgtagcagcctaatagatgctcactgtaagaattattatttttatattttctgcaaaagtacagtgatgattcttgggttaacctaaagcgtgattttcttttatttcttcctgtttcttttctttttcttgttcactttaaagaattaaaaagaaaatagattccagcattttggaataaaaattcacatcaaaatgaatttattcattttattgacagataaacaaaatgtcatttgtttattcaataaacatttattaaatccctagtaaatttcagacatcataccaggcacagtgatgacaatgacaataagatgtggtctctgccctcaaggagctgatagcccaggagactgacaagtagacaggtggttacatgcagtgtaacgaaggctgtgatgtcatacaggaagacaagtgggagtatgtgatgggagtatggttttgaccagttcctcctcttagatttatccctttttctttgggtataaagcaaaagaattggtcctattttttttccttaactgtgcaaattaaaccataaatttaaaaaactttataaagataaaaggcaagcagtcaggcgcagtgtctcaggcctgtaatcctaacactttggtaggccgaggggggtggatcacctgaggttaggagttggagaccagcctgtccaacatgatgaaactccgtctctactaaaaatacaaaaattagctgggcgtggtggtgggcaactgtaatcccagctactcaggaggctgaggcaggagaattgcttgaatccaggaggtggaggttgcagtgagccaagatggagccattgctgtccaccgcctgggtgacagagcaagactccatctccaaaaaaaaaaaaaaaaaaaacaacttgaattatagatgaacaacttgtattatggaggacactagaaatagtgtttcctacagagtcagggcttcctaccaacattgtcatttctagggtttttgacctgaaaagttctgtggcatattttttctttcctatccatttcttgtgtgttttttttttctatttcttccctgctttctctcctctactttatcttctagagacctaggtagttcccaaaggaatagtgctttatggagtctaatggtgatttattatgtaaaagcagaaaattattttttttacctaaaagttccataccaaaaaatgaatatagactttttatgcagtttcacacattgaaaatgcaggtaattttaatttcattgcatttttcagaattctcaatcgcaatcctctgactactgtcgaagatccatatctctttgaactgccggcattaaaatatctgtaagtactatagtactctcatgagtcatgagatgatttatgctttttaaatttgtcatcaaagataaagtattttgcatttaggctaaaaagtcataatttaaattttaactgagttattgaaaaaagttattggcaaagaaaaggattaagaaaggatgtataatggtcaagacagccagcgggggaagagattagtgttgaagaagccgtatagatttggaacatgtagacacatggaggaatattacttaaccaagaaagcaaagagaaataggtgttcattattctaaaaagaaagaaaagagtaaatcaagatgggtgaatgcaatatgaaatgagaagtaagataatggtaaaaaaaaaagtgtaagttctcttaaatatcattaatttgatgacgtagatcaacttaaatttctttaataagatctctctggaattttacggcaaataaactattgaagtggcttgttttatagagaagccaaaatagaagtaatcacatgtccttgaattatcttttgaagtacagaattttgtaatgggttcatatcatgaatgtttcggctttcttcttcagagacatgggaacaacacacatcacacttacaacacttaagaacattctcacgatgactgttgaactggaaaaactgtaagttattttttcttagatttatttttacttagttggttttttaggtttgttttattattttcttaagtcaggtttattgagatttaattttcatataacattcaccctttataagtgtatagtttgatgagttttgacaaatgtatagttacataaccaccaccacattcccaatataaagcatttctgtcacctcagaaaggcccctcatttccctttgtaggcaatcccttcctcccaccatcagcccctgttagctactaatctgatttctgttcctagttttgtctttttcagaatgtcttataaatgaaatcatgtagcatgtagcctcttgtgtttgacttctttcacttagtattgttttttattttttttgagacggagtctcactgtcactcaggctgcagtgcagaggcatgacctcagctcactacgacctccgcctcccaggttcaagtggttctcctgcctcagccttctaagtagctgggattacaggtgtgtgccaccatgcccagaaaattttcatatttttagtagagatgaagtttcaccatgctggccagactggtttcgaactcctgacctcaagtgatctgcccacttcggcctcccaaagtgctaggtgtgagccacctcgcccggcctcactcagcataattttttttgagattatgctaccatccatgttgttgcccctatcagtacagctggccctccatatctacatgttcctcatccatggattcaactaaccatggatggagaatatttggaaaaaataaaatatataaaataatacaacaataaaacagtagaaaatttaaaacacggtacaattatttacataccatttacactgtactaggtatttaaagtatacccgaggcttatgtcatttattatatcaagtattatgtcattccatataaaatatttcagcatctgtggactttggtatctgcagggggtcctggagccaatcccctgcagacaccgagggacaactcttcactcctttttattgctcagtagtattccagttgtgtggatgtatcaatttgtttatccattcatcaatgtatagacatttgggtagcttccaattttttgcaattatgaataaaactcctaaaaacactcatatacaggtctttgtgtgaaccaatgttttcatttctttgggtaaatacctaggagttggattcttcacatgcttagtgtatatttaactttttaagaaactgctgaactgtttcctaaagtggctgtgccattttacatttccaccagcgttgtatgagagtcacagttgttccacatcttcagcatttttttttttttttttttttttttttttgcaacacagtcttgctctatccccaggctagagtgcagtggtgccatatcggctcactgcaacctctacctcctgagttcaaacagttctcctgcctcagcctcccaagtagctgtaggcacccgccaccacacccagctaatttttatatttttagtagagatagggtttcaccatgttggccaggctggtcttgaactcctgacctcaatggatccacaccccctggcctcccaaagtgctgtggttacaggcgtgagccaccatgtccagcccagcagatatttttttgagacagagtcattgctgaagtgcagcagcaagatctcagctcactgcaacctcggcctcccaggttcaagtgattctcctccctcagcctcctgagtaactgggattatagccacacaccaccatgcccagctaatttttatatttttagtagagatggggtttcatctt[137 bp omitted]gttcacctttctactgctagatgtgtagtggaatctcactggttttaatttgcatttctttaatagctagtgatgttgaatgttcatgtgcaaatatcttctttactgtactgttcaaatctgttcccatattttaattggatattaatatttttattgaggcttttttcccctgttatcccattggagattcattattattgagttttaagagtgctttaggccaggcatggtggctcatgcctgtaatcccagtactttgggaggccaaggcgggtggatcacaaggtcaggagatcaagaccatcctggctaacacagtgaaacccagtctctactaaatacacacacacacacacaaacacacacacaattagccgggtgtagtggcgggcacctttagtcccagctactcgggaggctgaggcaggagaatggcgttatcccagggggtggagcttgcagtgagcagagatcacgccactgcactccagcctgggcgacacagtgagactccatctcaaacaaaaaaaaaagagtgctttatagattctagatacaagtcttttcagggaccaggtacagtggctcatgcctataatcccagcacattgggaggctgaggcaggaggattgcttgaggccaggagttttagaccacctgggcaatatggtgaaaccttgtctctaccaaaaacataaaaattaggcaggtgcagtggtgctcacctgtggtcccagctacacgggaagctgaggtgggaggattgcttgagcctgggaggtcgaggctctgcagtgagctgtgatcaccaccgcactccagcctgggtcacagagtgagatactatctcaaaaattaaataagtaaataaataaaaacaaaaaacaaggccttatagatatgtgtttggtaaatatcttctctcagattgtggtttgtcttttcattctgttaaaagtgttctctggctgggcatagtgactcacacctgtaatcacagcactttgggaggccgaggcaggtggatcacctgaagtcaggagttcgagaccatcctggccaacgtggcaaaaccccaatctccactaaaaatacacaaattagccagttgtggtggcccatgcctgtaatcccggctactcaggaggctgaggcacaagaagtgcttgaacctgggaggtggaggttgcaatgagccaagattgcaccactgcactccagcctgggcaacagagtgagactctgtctcaaaaaaataaagaaagaaagaaaataaataaataaagttttgtgaagagcagaagtttttaattttgatcagctttaagttagcaattttttcttatatggcttgtgcttttttgtttcttacctaagaaatctttaagaacctgttgtttaatccaaagtggaaaagatttactctatatgtcttctcccagaaattgtgtagttacatttagatctatgatccattttgagttaatttgcatatatggtgtgaggtttattgtttttttgtttttttgccattttatttttattttttggagaaatgaggtctcactgtgttgtccaggctggtttcgaactcctggcctcaagtgatcctccggcctcgttctcccagagtgctgcaattataggcatgaggcatcatgcctggccttctttgtagatataggtatagatatatatccgtctatatctatatatatcttcaccaggtgtgatggcacactcctgtagtccccgctactggggaggctgaggcgggggtatcgcttgaacccaggaggtagaggttgcagtgagccaagatgacaccactgcactccagcctgggtgacagagcaagaacctgcctaaaaatatatatatatatatatatatatatatatatatatatatatatgtatgtatttttatatatatttctatatatatattctatatatatatttctatatatattttatatatttatatatattatatatatatatatatttctgcaaggccctattgtgagtttgttacacaacttactgcaacttaaattgtgccaccaccaccccccacaatatggcaagctaaatagaaactcagttatgctaaggctggttgagggcattatgcaagattagcatggaaagggcccttcatttggcactctgctccgttcatttttgtcaggtcactttcttatcttcaccgggctgtcagatctgttttactgctctagcctcactttcctcagcctcctacagcatcttccctgtaagctacatcccttcctctctggatgaagtcctcttcattgaccaactttctcacttagttctctaagatagtgaggatctgtctgctttcttcttgaccattagtggataggaaaaaaatgctctgattttctgtaaccatttgtcaccaaggccataaagacattgaactaatttccttattggagttcattattggaagtcttgaggagtttacacatttatctacaaagtaagtaggccagctcatttgtcttggctcatgtgtaatctttaaagcatattgaaaaattactattctcaagtaaggataatgtatatctcaggtcacttacagtctcaaagttttgtcagtatactttaaaacaatcctgcgaacagatctagattgaaggagactaaagaatcatgaactcgaggtggccccggggcaggcgcagagctggcaagcacgtggtggggcccctgaggcgtgcagagggtcacgcacctgggagcctgttgctggcacggtccgggcggaggttctgcggcgggaggcagcctgtcggttgcagggctgaaaaagcagttctacaaggcaagccagctggtcagtgagaaggtcggaggggctgaggggaccaagctggacgatgacttcaaagagatggagatgtcatcagcaaggcggtgacggaaatgctggcaaggaccatcaagtacctgcagcccaacccagcctcacaggctaagctgaccatgctcaacacagtgtgcaagatccagggccaggtgaagaaccccggctacccgcagttggaggggctcctgagcgagtgcctgatccgccaccagaaggagctgggcaacgagtccaacttcagtgacgcactgctggatgccggcgagtccatgaagcacctggcagaggtgaaggactccctggacatagaggtcaagcagaacttcattgacctcctccagaacctgtgtgagaaagacctgaaggggatccagcaccacctgcagaagctggagggccgccgcctggactttgactaaaagaagcggcagggcaagatccccgatgaggagctgcgtcaggcgctggagaagtttgaggactccaaggaggtagcagaaaccagcatgcacaacctcctggagaccaacattgagcaggtgagtcaactccgggccctggcggaggcgcagctgaactaccactggcaggccatgcagatcctggacgagctggcagagaagctcaagcgcaggatgcgggaagcttcctcacgccccaagcgggagtataagcccaagttctgggagccctttgacctcggagagcctgagcagtccaatgggggcttcccctgcaccacagtccccaagattgcagcttcatcccctttccgatcttccgacaagtccatctggactcctagcaggagcatgccgcccctagaccagccaagctgcaaggtgctgtatgacttccagcctgagaaccatggggagctgggcttccatgagggtgacgtcttcacgctgatcaaccagatcaacgagaactggtaccagggcatgctggacagccagttgggcttcttcctgctcagctacatggacgtgctcatgcctctgcccagtgactcactggtgcccccgccccgcccctccatccacactgggtggcacccccgccaggtctcctgccttccatgggctcctgctgccaaggcggtgtccaagcctgccggcgccacccaggcccgggcccttgaggtactccctcagcagggagccacacttgggtgggaggcttatctgggtgggtggggacgcttgtttaaactagcgctgacccctaacggtgacggctcccttcctcactccatggcgccggcctcctccctgctccccaactcctcacccagctggcccagacggggcaacactaaggtgctctcagaaacactaatgttcctccagggcagcccccacctccgtcctgaccccatgggggcccagcccacagcctaccctcgagttccacggccttaacaggcttggatcgagtgtccctgtggggtggctcagagacaggaccctggttttaaatccctccacaagcctgctcctggcgatgaaccctagccccactccagggccacagtaccccagcctcacacatgcactccttctccccaaggccagggcagagggcctcactgtttccctggcctgctgtcagcttgcaaccaggagacagaggccagctgggatctgccccaccttcccccccatactgctcccctcaaccaggacagagaacatggcctcctctagggccctgcctcccaagccttaccctcacacaccaagtaccttttcagctttttaactgcccccagccaggcccacggaagcctgtgtcactctggcacaagctgccaccaccagccacctacacacccccccagcacacctcgcacgggaccacagccccagccgtgctgctaagggccaagcacaaaggctccagtgagcaaatgttcaagcccctggtagccaggcctccccttgccaagccgctgccaccccaccctgtgggaagtggcccccagccatctcctctagaccacggcaggcagccccggggtccccagacccctgtccaggccagcatgtctgcagccccgacatctgcttcctctgtcgcccaatccaaaatcgacgaaatggagggtcctctgggctgggccacattcacattcccttccccctgaggcccagcaaagcctccggaccccaggctctgctctgcaccctcgtggtcggcagtacatgaagggcacagacaccctggcagagatgagcacacagccttgggcacggttcagggcaaactgaaatgtatgcccgaattttgtaaacagaagtattaaaggtctttctacaaaaaaaaaaaaaatcatgaacacaaaatgcaatgtctgatgtttgattggattctgaattttttaagccatgttatgattgggacaattgtgaaaatgtgtatatggaatgcatagtaggcaatgataatattaagttccattgggtgatgagagtcttctggttatggaggagaatgcattggttcttaggggctgcacactgaagtctttaatggtgaagggtcattatgtctgcaactgactctcaaatggtttgtccagaaaatgtataaacatacacacatggaaaggaaatgtggcaaagtattagctactgttgattccagatgaaagttatacaggtgttcattataccatttgaaaatgcttcctagccatcctaagccttaaaggaaaaaaagaaaatgtttaaaatcaaaagctggaggcaggaagagaataacaaaacctttgggctcatgcctgtaatcccagcactttgggaggccaaggagagggggttgcttgagctcaggagtttgagaccagcctgggcaacgtggtgaaaccccatctctacaaaaaatacaaaaatgagccaggtgtggtggcacgcacctgtagttctagctactcaggaggctgaggcgggaggatcacttgagcccaggagacaaaggctgcagtgagccgagattgcaccactgcactcaacctgtgtaacagagcgagactcagcctcaaaacaaaagaaacatctttgtgtcagagttaaggttgctatataagtaaaatgctaggttatggttctgggtacattcaatctatatgaagatcagaggcttctattggacccaaaggaatacgagtcacttgtgattattcctctataggtttgaaagatgtatcaggccaacttactggatacagttttaatttaaaactctatacatcatacccccaactcacagacttcatgtatccattgaatactcttctgtttccacagtcttaatgtggccctaacaaagtcatccttttagaggactcaaaagaggccccccctacaacttctataatgtaatatttacagtagttaacatttattgatcactcagtgtgtgccagacatttttcaggtagggattcatttaatcctcaaaactcatttgaggtaggtactattataatgacaaggccaaggaacagagattaagcaatttgcccaaatttacattattcacagagctgggatttaagcctagtctggctgtggaatctgtattcttaatgaccatgctatactgcttaagattaaccttgagaatttattccagttacagagattgtttttatttctctgaaactgcccccaagaagccataacaataaattaatcaattatcttggttatctcttttgcccaaatttatattttgaaaaaaattcaaacatgccagaaagatgaaagaatactacagaatccagtcaaagatcaggcactgcatgtcatgtcttcatttcctttaatctaaaacatgcctctactttttttgatctttcatgacattggcattttttgagtcaaagatagttgtcttgtaagttgtcccacaatctggatttctctgtttccacatgagattcaaggtaagcatctttgggaagaatactgcataggtgacgtatctttcctgcctcgtgaccccaggtggctcataatgctaagtttgatcacttgtttaaggtgatcttccagatctctccactgtggttattttgctgggtgtggtggctcacacttgtaatcccagcactttggaaggccgagatgggcaaatcacttgagtccagttttagaccagcctgaacaacaaggtgaaaccctgtctctactaaaaataacaaaaataaaaaactaaaattagctggggtggtggtgcaagcctatagtcccatctatctggggggctgaatttggagggtcacttgagcccagggggtcgaggctgcagttagctatgattttgccactgtacttcagcctaggtgacagactgagaccttgtctcataaaaaaataaaaaataacttttccctttgataattaataaaaaatctgtggggtggtactttgagatcagtgaagatcctgttctcaaatgtcttttcacccaactccatcagtgataatctttgtctgaatctatttttattacattggtggttgcaaagtgacactttttaaaattctgtcattccttctacatttattagctatcattatttcattaaagaacaactccccctcttttaaaatatcattcttcatggattttttatatattatgttgtagcttattgttgttattcttttgaatgctcaaattgtccagatttggccaatgcaatctccgttattttttttaaccccacaatccaggttaagctgagctatttttaatgcctagagtaatttctaatacttcccactcccaacagaaattgagaaagggccttcagaagttgggggcttattcagactcttcttagaagtctaccttcttcctgtatctttcagcccaaagtgagacttttgagtcgggaagagatacctctgaatttaaactactgatcagtgtcacccaattctaatcccaaccacctttattctaggcataccatactcactgccatgcttacccttcagttgggcacctgtgtcctccttcccattggccttctggttcctacccaagtgtccagtccacgggtctcagtaacacctctttgcccagccctgtggtagcgttggctgcctcctttacctactcaagtaaccgctttaccactaatttattgttttgtgttttcatctataggatcttacctagccatatggcctgctgcctctgccaatttaaaaatagcattgaggctgtctgcaagacagtcaagctgcattgcaacactgcatgtctgactaacagcatacattgtcgtgagtccaaattgcctggtgataaattgttacattattttaagtatttgtttttaaatttttatttttaattgatgaaattttaagctgatgatataattgttttatttactcagtcagatttcaactccctcaacttctgaatgactcccttgctgggagtcaggttctcagttattattacaaaatttaataatggaacagttccatatgcataaaggaccaagagaaagaaatgggaaggctagggaataacattaacatccacacactgtgtactgtgctctctgcttggtgctttgcccccagtgataatttcttcatatagtgcaatgtagtttgtaagctggttttatatctgtgaggtctcaagtactctctgccttttaggacagatgtagatccggttttgtttttgtttttgtttttacagttttataagagtagaagtgatgctgttttatttgaagcctgagagcttctggttccataaccagaaattgctacctggctcttctattggaatggggcttttccattcttagtccatccaactctgaacttgctctgaatctcaaacctttctattcgcagaacaaatgctcaagttttttcaagagtttttctgtagattaggtttattagcaccaacttcatgacttctaaaatgtgactgcttgaatacaggtatctaccagtgatatggggtggataattaataatgcttggctacttctataaagacagtgttgcttatttttcaaaactttttctttttttcttttttttttttttttttaccaattatattcttcccttctccccaagaggtgggcagaaaagcattgttaatctccttttacaggtgaggaaaaacaagatcagaggtgctaagtgctgtagcctagtgccaggtcttctgtccccaattctgggttctccccaagcccatgtttctcctttctcgcaatctttacttcttccgctgaccttcagcaccacccaaaatacttttaattctggaaaagaagcccagctgcacactggcacacttgaccttcatgcagtcagaagctttggatggttccccatccaaaatattagagatgaatgaaagtgaagtaggcatctgacaaaagtcactttttcccttctgcatttaggacctcaagtaatgtttatccagaaactgctaccataccatagattcattgtatatttaacaacataggcatacaatctggcaaattaaaaatctcttaacctacaccctggatccctgcccaaatttaagaaaagaactaaggtggacacagtgtttttttccatgtcgcatcttctgtgatggggctatgatatgtgggagcagagaatggggtgggtgggtggagcacatgccagatgaggatctatcagcaatgggagggggcatcccgccctgctcctttagcatctccaccctgctcctctcagaggaccgcctttgattgcattcagctgcgatggtagcaagaacacgggcacactgaggatgaggagagtgggagccttgtgctctctctgcatatgaggcaggacagcacagggtatggagcagtctgcagagaggccagttcatcagctcatcagggaagcacttgtcttccaccttgggctttgactgagcactgggcaattggcccctggggatcaacggaataatcctaagcagagttactctatgtcacactatggaatgttccaagtaggtggccatgtcttttcctcctttcgttgttgccatttcataggtttaggtttgggtgtatgtttctcctctctgaatggcactcgaatgtttgctgactcttactctgtgtgactggggcatatagctatggactgagtatgaaagatgatcaaagatatttcatgatcaaagcagtctcttcttttctgacagctgaagaagcatctgtagggaatccagaaggagcgttcatgaagatgttacaagcccggaagcagcacatgagcactcagctgactattgagtcggaggcgccctcagacagcagtggcatcaacttgtcaggctttgggggtgagcagctagacaccaatgacgagagtgatgttagcagtgcactaagttacatcttgccttatctctcactgggaaatctaggtgcagaatcaatattgttaccgttcactgaacagctattttcaaatgtacaagatggagataggctcctgagtattttgaaaaacaatagaaagagcccctcacagtccagccttctaggtaacaaatttaaaaaccaaatatttgaaaaaaaaattagaaactgtgcaaccacaggaaaacagcctggcagattcaaagtgtaggcaaaaacctgcagagagtgaacagagtcctcatgggcccaaggagcatccaggaaaggcacttcaaaaaggtgggaaagcacagcactaggaaagaacaggatgcccaggcatttgtggacaatgctgccaaaggaaaaaggcttgagggtccagccccaagggagctggaacagcctcacatagtgcaggggcctgagaaggtagtgggaaacaccatctacaccaagccttcattcacccaagagcataaggcagcagtctcctctgtgctgaaacccttctccatgggcgtgccttctgcctctagccctgcaaaagccctacctcaggtcagagacagatcgaaagacttagcctacaccattttaattttagaaatggcaatggctagagtgaaaaacatgaaggctgctaaaccaatcacacattccagaaaaaaataccgcttttataaaactcactcccgtgtggcccacagaacaccgaaggccaaaaagattagaaagtttagaaagggcagttatctcaacagaccgatgctcgcaaagaggccgctgttctctgcagcgaagagcctcataaattcgcaaggggttttttcatccttaggagacctgagtcctcaagaaaaccctcttctggaagtagttgctccttcagaacgttttatagaaaacactagtgtaaaagacacaactaatgtaaaagacacaaaagagatgtgttcaaagacacatctctgaaaacacaaactacaatcatcctcctgaggcagtttccgctgggactgcattcaacttagaaccaactgttaaacaaactgagacaaaatgggaatacaacaatgtgggcattgacttgtcccctgagcccaaaagcttcaattacccattgctctcgtccccaggtgatcagcttgaaattcagctaaccgagcagctacggtccctcatccccaacgaggatgtgagaaagttcatgtctcatgttatccggaccttgaaaatggaatgttcagaaacacatgtgcaagggagctgtgccaagctcatgttgcgaacaggcctcctgatgaagcttctcagcgagcagcaggaagcaaaggcattgaatgtagaatgggatacggaccaacaaaaaacaaattatattaatgagaacatggaacagaatgaacagaaagagcagaagtcaagtgaggtgaggaccacacagaaacatgagacccagatttcccatcatttagcgtatgccaggagagtgcccacataggagaacctgggactcccaggccatagcttgtcttggccatgtaactttggccatgacagtgatctcccactttgctcatgtagacagt[132 bp omitted]tgaaaccccgtcttcacaaaaaatacaaaaattagctgcgtgtggtgacacgtgcctgtagccccagctactcaggaggctgaggtgggaggatcacctgagcccagggaggtcgagtcagtagtgaactgtgatcgcaccactgtactcccgcctgggtgacagagtgagatcctgtctcaaaaaaaataaaaagaacaaaagaacctgtaagctactcaactggcatactggggttttgaaaagttagcttccattctctctctctttttttttaattgttctttcttttttcttttttttttcttttttttagctcatgaaagaagttccaggagatgactataagaacaaactcatcttcgcaatatctgtgactgtaatactaataattttgattataattttttgtcttatagaggtaaggacaataattaattcaggttttcagaatacaatcctgtgtttgtgtggattcagaatccacaaactgaaaaccaacgtcactttcccacttgacattcttcttctgtcatttaaggctgaggtgtgctttgttcttttactgcaatgtatattccaggattgttaaaggatcctcgcttccaggaggtctctgtgaaataaaaccaagttaatcccactagactattttaagaagttaagttgatataatagcaaaatttctcccacccaaaactatgtcaacaattggatgtactcactgagtcaccccttactctgccactaatttatttccttgttgcttaaatgatgagagacatataatctccaccctcacggagttgtaatcaccctggagaggaagaagacagccaaaagagagaagtattgtcttgtagacttattagattcacatagtatcatccttctccagtgtgtaaggtgttgtctaaataggtccagttaaagaactacagggtagccatttttaaaaaaaaattttggccacgttttcaaattcacaggggagggggaatgtctcatactccagccctcctgagcctaggccctctgtgagatgtgtcaccatttcttggacaccatatgagacattccccctcggattagagatgctcaacctgcatcaacaaatctaaagcctacatctggctaccctggggcgagtcctgtttacagtgcccattcctggagctcgcctctttttgccttttgtttgattatgtgatgtattacttttcccagcaggccagtgctagcacactggaagagggatttaataagctggcacccttgatgctatgctcctaatccaaccttatttgcctcattggccatttccattatggtggcagccctccattccagccacagcagcccctcagcgtcccccagtcacaccgtccccattgctgcttatctgtgcctttgtccatctacaatgcccttatttcactctgcctgtgggagtcctgtgaatc[148 bp omitted]agtggaaccccgtctctactaaaaatgcaaaaaattagctgggtgtggtggcgggcgtgtgtcgtcccagctacttgtgaggctgaagcaggagaatggcatgaacctgggaggtggagcatgcagccagccaagatcaggctgctgcactccagcctgggggacagagcgagactctgcctcaaaaaaaaaaaaaaaaaaagaaagaaagaaacttccctgaatattccagccctcctgagcctagtccctttttgagatttgtccccatttcttggacaccatatgagagacttcagaggctgaagtgggaggattgcttgagcctgggaggtcgaggatgcagtgagctgtggtcataccactgcactctagcctgggcaacagagcgagaccttgtctcaaaaacagccaccaccaaaaactatcttgggatttgaataggattaccttaaatttgtagataaatttgagaattgacatctgtacgacattctagaacatggtatttcatgtcatgaattcatttcttgttaatgtctttcagaagagttttagggtttccatcatatagatcttacacatcttttgttagataacagatctttgtatttttgttcctaaatacttcagacatttgtattgccattgtaaatgggatctttcttccattttctagttagttattggtggtacatctgaaaagcatttgaggtttgtgtgctgctctcttgattttgtttctagccaccgtactgaattctcatattacttccagtaaaatcttagttgattctcttaggcttctttggctaacatttattattttatatgcaaataatgacagttttgtctcttccttttcaatacttacactctttccttcctttcctttcttttttttttctttctcagggccttgttgtcacccagactggagagcaatggtgtgatctagctcactgtaacctcaaactcctgggcttaagggatcctcctgcctcagcttcctgagtggctgggactacaggcaggcagtgaatttgaaaacttttgttgtagagacaagatcttgctatgttgcccaggctggttttcctgccactttagagcaggtttcctttttttcatacttttaagagttttttattaggaattgtccgctgaatgttagctaaaacagtcaataaaatgcgttaagtaccagctgcatgcaagaccctaagttagatacagtcagccctcttcatcagcaggtccacatcttcagattcaactagataaggctgaatatttgaagaaagaaacaataaaaatacaattagaaagtacagtataacaactgttgtcattatacaatatctatacattttattagtgatgacctaaagtacatgggaccaggcacggtgactcacacttgtaatcccaacactttgggaggccaacctgggcagcatagtgagaccttgtctttaataaaaataaaaataaaaaaattagctagtgtggtggtatgcacctgtagtcccagctactcaagaggctgaggtgggcagatcactggagcccaggaggttgcggctgctgtgagctgtgattgtgacactgctctccagcctgagtgacagagggtgatcctgtctctaagtaagtaaataaataaagtatatgggggggggtgtgttggttatatgcagacactgcaccattatacgtaaggtattgagcatccacagattctggtatggtgtgggggcgatatcctagaaccagtcctctgcaaggtagcaaggatgactgaactgtggaagaatcaaagcactgttaaacagcatacaattcctgtcttcaaaaaagttatctcatcgggtagatgagacttaaaatgaataaaaggaatgaatacacattggagatagtggttgttgtgatagataaccttaattgtgttttcttccaaaacaggtgaattcacataaaagggcatcagaaaaatacaaagacaacccatcaatatcaggagcctgagcatgagttaaagcatgtggatggcctggagctatgtttttaaaattgttattaaatattggttttttacttaaatcaatgaaaactttctttactttgtggttgtgttcctcaaaatgagaatttttaacaataataaaaataaagcttgttagatcatttttaatggtaataaattggttactgaagatttgactaaagagaaaactaggccaatctaagtagagtccaaatgaagtagaaagtccatagagaacaggcaaaaaggaagttgtggaaccacagacagtaaaaggaaaaaattggcggggcgcagtggctcatacctgtaatcccagcactttgggaggctgaggtgggtggatcgcttgagcccagttcaggcaacatgacaaaacccccatctctacaaaaaaaatggtcaacatgacaaaacccccaatgtctacaaaaaaatacacaaaacacatgagccaggggtggtggtgtgcacttgtagtcctagctacttggtaggctgaggtgggagtatcgcttgaacctgggaggtggaggttgcagtaagctgaggttgagctgttataccccaacctgggtgacagttgaaagagtgagaccctgtctttaaaaaaaaaaaaaaaggaagaaagcaaagaaaaaaaaaatttatttttgtgacaaggtctctttctgtctcccaagctggagtacaatggcataatcatagcccactgcagcctcaaactcctgggctcaaggcatcctcctgccataaaggcctcccaaagtgttgggattacaggcataagccactgtgaggctagattttttttttttttaagcaaggtttggctctgtcacccaggctggagtgcagtggtgcaatcttggctcactgcaacctctgcttcccaggctcaagtgatcctcctgcctcagcttctcaagtaggtggaactacaggtacgtgccaccaagcctggctaatttttgtattttttgtaaagaaggggtcttg[131 bp omitted]aaaattcaccaagccattttgcatatttttctggaaagatacagatacatatgtatatagagagagagagagagaaagagagatctggactggacaccttatactatcagttgggtataactttgtttcagaaaggacaaagggaactgattagagttaaggcacatatatgtgtgtgtgtgtgtgtgtgtgtgtgtgtgtgtgtgtattttcccaattcctcataccactcctttttattaatttttattgagatataagttatacaccataaattcacccttttaaataagtgcagaatttagtgggttttagtatagtattcacaaggctgtacagccatcaccactatttaattccagaacattttcatcaccccagaaagaagccccagaatcactggccctgctccccatttcctctcctatttcctggcaagtatttacttacttcctatgaatttgcccatttgggacatttcatataaatgaaatcatacaatacatgatttcactaaataagacttttgtgtgtggcttcaaacaatttttaaaaattgaagtaaagtaggcataatatttacagtctaaccactgccccctctccccacctattttttgagacagggtctcactctgtcttcctggctggagtgcagtggtgtgatcatgactcactgcaacctcaacctccccggggctcaggtgatcctcccacctcagtctcgcaagtaactggcaccacaggcacacaccaccaaacctggccaagttttgcattgtagagacaggatttcgctatgttgcccaggctggtcttgaactcctggactcaagtgatcctcccacctcagcctcccaaagtgctggtattaccggcatgagctaccacacctggctgtctctaaccagttttaagtgtacaattcagtagtgttaagtatattcacactgttgtaaaacaaatctccagaactttttcatcttcccaaattgaaactctgtatctattaaacactaattccccattctctcctcccagcccatggtaaccacccttctactttctgtctttatgaatctgaccactctaagtacctcatatgagaggaatcacacagtatttgtcctttggtgactggcttatttcacttagcataatgccctcaagggttctccatgttgtaacatgcgtcagaaattcattcaaggctgaataatatatccgttatatagatcaatcacatttgagttatccattcatcagttaatgcacatgtaggttgtttccaccttttggtcattgagaataatgctgctgtatacatatgtgtatgcgtttctgcatgactatttgtttgcaattcttttgactatgtatgtctcagctcactgcaacctccgcttcccgggttcaagcgattctcctgcctcagcctctcgagtagctgggattagaggcacctgccaccacactcggctaatctttgtattattagtagagacagggtttcaccatgttggccaggctggtctcaaactactgacctcaggtgatccacccacctcggcctcccaaagtgctgggattagaagtatgagccaccacacctggccatgaatttggtccagtgtctgaacttcacctctagagtcccttccagcctcctacctcactcccaccttggcctcctgagtagctgggacaacaggcttgcgccaccattaaccagctaattaaaaaaaattttttttctttgttaatatggggtctccccatgtttcccagactccaaacctatttcctaacctttatcattatctgcttctgtgggatgtgaatggaagcgaggtgtgctacattcaggcttttaacacctcccacctgcaccttctaattcttcctttgcatcttctggctggacaaagagggtcttgtggggcctctgagtcactggaagaaggtgaagccacaatatagctggagtctggttcccaggtgcagcagtgtgatgtgagtgagaaagtagcctttagtgcattaagccactgggatctacaggttgctcgtagatcaaccacgtctacagacgtgggggcaccaccatgctcagctaatttgttatatgtttatgtagagatggggtcttgctatgttgcccaggctggtctcaaacttctgggcttaagcgatcctcccatctcagcctcccaagtagctgggactgtaggcgcatgctaccatacccagctaatttttaatatttttttctgtagagatggagtcttgctatattgcccaggccagtctcgaattcttgggctcaagcaatcctcccgtctcagcctcccaaagtgctgggattataggtgcgagccaccacgcccaaccagttatttaattcttataacagccctcggaggtaggttccattgttagccccaatcttatttatttagatggagtctcactctgttgcccaggctggaatgcagtggcatgatcccagctcactgcaaccttcgcctcctgggttcaagtgattctcctgcctctgcctcctgagtagctgggataacaggcacaggccaccatgactggctcattttttttttttttttttttttttttttttgtatttttagtagagacagggtttcaccacgttggccaggttgatttcgaattcctgacctcaaatgatctgcccacctcggcctcccatagcccccatctttaaatgaggaaattgaggtgcagagagggtcggccactcgccaaatgggaaaagctagaattctaacccagaccatttgccttcaaaacctaccctgaccaccacagtaacctgtgataaggtgcaactcagagtaaataacctcctctctgggccctgatgtctctctacctacaatggatttcctgttcctgtgtggggagggaggtgcaacaccagcccctgagctttgagccttgcctcgtcctccctgtatattaaggagtgctcagatgtggctgtagctgcacctctttctccaagatggagcccacccagagatgctgtgtgcaaaaggcttgactcacagccggcgcataataagccttcaataaatgtttgaaattattattctcgatggtgtcacggtgctggctgaaaggcagcatagctcagcagttaagccagacgggctgggttcaaatcccatctctaccatgtaatagctgtgtgaccttgggtaagttactcaacctctctgttcccccatctataaaatgggggaaatgacactatctattttatagagctattgcaaggattagcatagaaaatgcctcaaccgtgcctgccactgatgtcaggttttattattgctgtaacactttcccctattcagagtttcatctcctagatccccgggcacggaaacagctggctttcagatcagggcctccctgggaggttttagtctcagcacaagtcacctgccttccccctctctggctcccagcagccccatccttcccccagtcttggcccgggttccagcaccgtctcctttgcccctcagccccagggtgaccaaagcctctgcctcgtgggacggctttctagcactttcctccttttaagagattgactgcaatttctatagtaacatcacattagccagaaattaatgtcctcattaagatagcaattaggcacattagcgtggcaataaaaggaagcttatgaaataactgctggttccaaaatgcctttaatttagtattttatattgtgccatgttattaatttttttccctcggcagaagataataagagaaatgtttgaattgtggggaggtttaaaataaaaaaaatttttgagaaggaaagcaatgttgatacctgtagacagacgatctgtcttctccccaaaacctcattggtcctgagtccatagggtgactccatggggtgtcagaagagggacagcattgatgggtagggggccaggccatgtcctgggacttttggccgggcttggcatccagcggagattggagtggaacagcctttgatcctagaagcaggagaaatggtgccatgtttctttgccctaaacaacaaatacctgttggtttgggatttttgccccaataggctccatctcctgaattcaaattctttcagcaaatgtttccttggtaccctgtggctctgactctgccgttgagggctttccagattgttggagacgacagatgtataaatgggaaaatgccatgataaactgggaatgcagtattttgcaacttgtaatgaaatcatggctctaggccgggcaccgcggctcacgcctgtaatcccagaactttgggagggcaaggtgggaggatcgcttgaggccaggagttcgagatcagcctgggaaacataatgagacccgccccccaaccgccaaccccgtctcttaaaaaaaagaaaaagaaaagaaagaaagaaatcatggatctaggacatgattagccatggatagtaaaatcattaggggaaaggtggatgaggaatggttttgtgtggctgggcacagtggctcacacccgtaattccagcactttgggaggctcaggcaggcggatcacccgaggtcaagagttcgagactagcctggccaacatggtgaaaccccatctctactaaaaatacaaaaaattagccaggtgtggtggcatgtgcctgtagtgccagctaacttgggaggctgaggcaggagaattgtttgaacctgggaggcaggggttgcagcgagtcaagatcgcgccactgcactccagcctgggtgacagaacaagactctgtgtcaaaaaaaaaaaaaaaaagaaaacaaaagaaaaaaaaaggaatgttttaggggaggcctgttctgctcccatctgagccctgggtcaactttagcgtcctaggctggacatgatgtggctcccattgggagcagtagtagtaggttggtgagggcctggaaggagacgtatctctctgagttaaggagggcacctcagaggatcaggcacatgaacagagacctgaaggagaaaaagcggaggatacacatagagatctgggggaagaaggttccagacaggaggaacagcgggtgccaagactctggggtgggaactagcatggagaagtagagatcagctaggaggctgatgtggctggacggaagtgagagagagaggagaggaggtgcaatcagagatatatcaaggaaagaaaacatggggggctgggcacggtggctcacgcttgtaatcccatcactttgggaggccaaggcgggcggatcacccgaggtcagcagttagagaccagcccggccaacaaggcggaacaccgtctctattaaaaatacaaaaattagtggggcatggtggtacatgtaatcccagctactcgggaggctgaggcaggagaaacgcttgagcctgggaggcagaggctgcagtgagccgagatcgcgccactttgcaatccagcctgggcaacaaagcgagactccgtctcaaaaaaaaaaaaaaaaaagaaagaaagaaaaaggaaaaatggggaatttcattggaaggccatgccaaaacacaaacaaaaaagaaacaaataaaggaaaaatggggaaggattcctcaggaagttaaagagttgacaatcaatttcagggaccccgggatttgagtctagctccttcgtgggcaaggggacgtgctgaccaatgcacacctgtgcctgccaggctccttgtcagttacctgttgccagttaagctgtctaacaaaggccaggcacagtggctcatgcctgtaatcccagcactttgagaggccaggcaggtggatcacttgaggccacaagtttgagaccaacctggccaacatggcaaaacctcgtctctactaaaaatacaaaaattagtcagtcgtggtggcgggtgtccgtaatcccagctactcaggaggccgaggcaggagaatcgcttgaacccgggagggaggcagaggctgcagtgagccaagattgcaccactacattccagcctgggccacaaagtgagactgagccaaaaaaaaaaaaaaaaaaaaaaaaagctgcctaacaacgcccaaatccagcagcttaggacaatcagcattaattttggcttcgcaggctacagggcagtttttctgctcctggctgggctcacccaccagcgtctatgggtccaagagtcacactgtatttattcaggctgggtcttttcgtatatttgggcccggctggctataggctggtctaggacaacaggattcttccctcatcctccagcaggctagctcgggcttggtcacctgacaggggcagggtttccagacgtcgaccagaaagatgtaccacctcttcaggcctagattgggaagtgacttcacttctgctgcaatccattgattggccaaaggagatcacgagaccaacccagattcaaggggtgtggaagtaggctccacctcccagtgggaggagctacctaggcaaagagtatagatggtgggcggtagaattgggtccgtgaagccaacttgaccagccccatgattcctttggggcttttgataatcattccctgcccctccctgggtaccccaaggcattctatggtcctcgaccctagctttggcccctgtagaagttctttttttttgagacggagtctcgctttgtcacccaggctggagtgcagtggcgcgatctcggctcactgcaagctcctcctcccgggttcacgccattctcctgcctc[133 bp omitted]cggcctcccaaagtgctggattacaggcatgagccaccgcgcccggccctctgtagaagttctttctgcccaggtttgcactctctctaagctcccacaggagctgtggcttgggttgttcaaggccccaaattcccgattggacttcctttcttcagctctgcattggggtgtgaccaggactgaagtattttattgaaatcattggctctcctgatagcaaacagagagttggtgtcagtaaggcagaggagaggttagtctgtagtgtgctatggagtaagggagcaatggaaatcgggagcttagtttgaacacactcagtgtccccttgtgcagtgtccaacctgcccaaccgtaccagcccaccctgactgagggactaaagagtggaggaaaggaaggggaaagggatttcactgacagctggagccttagtcctcgggccaaatgaaggaccttcccagaacagagtgacccagaaggaagctgtggcccaaccaccaagatgggtaaccccgacaggcgcaacctgccctcttgtcaatcaaggctggaccaggtggtgtggggaaggggtggaggactaagagagggggcaaagaggagggtaggaaggtcctggcctaaacgacccagttagtttcgccatcaccccctacccccatcctgtatcccagggaagtatagtgcagctgggttcttggttgccatggcgactgacaaaaaaaaaaagacttgaggggaggaaaacaccccggggcatgaagaagcaatttgctctcaggtctgggagtcagcaccggaatcagaatgtcctaaggaggaaagaaaactgagcgagccgggcttgggtaggtggcaaaccttcccaaggccccctgccagccatcctaagagagagagggtaggggcgaccccagctctgtgtgggaggcgccaactctaagcccccacccccgaggctgcccctcccacccgaagcgtttagcacccagggtctggggtggggggcgaggcgggggcggggcttcccaacggattgctttttttttttttttttttttaatttccagttccgccttgggacgagtccctggctgggggaaccgcatcaggcctgacacccatcccagtcccccctaaacccagaacgagatccaacctcactccccagccccttcccgacctcgccgctcaggctgtgatgggaaggtccctgggagtggggaggagggcaaatttaaacccggaggggatcctgtagcccagttccctaaacctccaggaaagcggagaaagtcacattgtggtggcagctgcgggttttttttttttttaatctgttaataaaacgcaagtgaatcaaatccgccctaagggaaggtgggggggcgcggcgaggcagaggccatggtgtttgcagaagttggaaatttaataagaaggaaaaataaaaatagccactgtgctggagagagagagagagagagagagagagagagagagagagagagagagagagagagagttgggagaagcaggcaagtgtgggactcctggctgggtggaaacgtgcagagggggctggggaaggcgagggcaccgcaccactagtccggaggagcaagggagacactgctggggataccaggaggggagtctttggggtgtcaccagaacagtccagttccttggcagatttttcaccagcaatgagctgggcacagaggttggggtttggccctctaaacacctgggtgtagaggtccagcctctggttacttggtcttcacagcgccccccaccttctgagctactcaagagatgggggacagtagcagtactgccaagaacagttgtgcaagttgcgcactgcacaagcatgccagacagaggctagagcagaagctaacatcatctgttcccctcaccacacattgcatctgcccagaggaagaggtaccttttattttattttattttattttatttattttattttttgagatggagtctcactgttattgcctgggctggagtgcaatggcacgatctcagctcactgaaacctctgcctcccaggttccagaaattctcctgcctcagcctccccagtagctgagattacaggcacccgccaccacgcccagctaatttttgtatttttaatagagacgaggtttcaccatgttggccaggctggtctcgaactcctgacctcaggtgagctgcccacctcagcctcccaaagtgttgggattacaggcatgagccacggcacccagcaaggaaggggtaccttttaaagatctacacaaggccgggcaccatggctcatgcctgtaatcccagcactttgggaggccaagacggaaggatcgcccaggacctgaagaccagcctaagcagcatagggagaccaccatctctacaataaataaataatgacaaaataaacatcctggccgggcgttgtggctcacgcctgtaatcccactgctttgagaggcctaggcaggcagattgcttgagctcaggagttcaagaccagcttgggcaacatggtgaatccctgtctctatgaaaaatacaaaaattacccaggcatggtggcgcacaactgtggtcccagctactcagggggctgaggtgggaggatagctggagtggaggctgcagtgagctgtgatcacgccactgcacaccagcctgtgtgacagagtgagatccagcctcaaaaaaaaaagaaaagtccacacaaagttgacagtgaaccagctgcatctctgaacacatccagtgataccccctccacccccctccaggaaacccaagattgctgacaggcccagctacagcagctttgagctggctgcagcctgtggggtcctctgggagcagctgaatggaatttgttcatgctttcactcaacaagtatttactgggtgtttatttcatgccaggtgccatgctgggcagtgaatgaatgaaccttgctctggggttaacactccagtgggatgaacaggcaaaccccacaagcactgcatacggtatgcaaaatggggtgcatgctatggagggacatacagctgggaggggtgggggcgggcaggggccctgggtgcaatttttacaaagtgacctcactgaggaggtgacattgcagcaaacccagaagcaggcaaggaggagtcacgtggctggctgagggaacagcattttaggcagggggaacagcctgtgcaaagcactgagaccttgttttgtgaattgagcgccttgaaatatgggttgcttggccctagttaaggttctgaaagagcctttaattttttttcccctagacctgggtgtggcggctcatgcctgtgatcctaactactcaagaggctgaggtgggaggatcacttaagtccagaaggttgaggctgcaatgagccatgatcataccacacggcacttcagcctgggtgacagagcaagactttgtctcaaaaacaaaaaacaaaaaaatccaattccggccaggcgcagtggctcatgcctgtaatcctagcactttgggaggccgaggcagctggatcacaaggtcaggagttcgagaccagcctggccaagatggtgaaaccccgtctctactaaaaataaaaaaaaattagctgggtgtggtggcatgtgcctgtagtcccagctactcaggaggctgaggcaggagaattccttgaacctgggaggcggaggttgcagtgagccgagatcgtgcactgcactctagcctgggcgacagagcaagactccatctcaaaaaaaaaaaaaaaaaatccaattccaacctatacaaggcagcagctgtgaggtgacacaagtatgaaccccattaagtccccccaaaagccaagaatcttggatttccttcacaagtgaatgacccccccaatcttaaaggaaaatcattctagcagcaaatcctagacaggagttactatcagccagatattgccatctgccttaactggtttaatcctgacagtgaaccccagtgatgtagaaaatgttaccaccatttttttttttttaatacagagtctcgctctgtcccccaggctggagtgtggtagtacaatctcggttcactgcaacttctgactcctgggttcaggtgattctcctgcttcagccttccaagtagctggcattacaggggcacgccaccacacctggctaatttttatatttttagtagagatggagttttgccatg[138 bp omitted]aatgcagtggctcccatgtgtggataagaagtagcttgtagatttgaacccaggacacctttctgtgcattgagccaggccgatctgcacccaggcacctgcccaggtggatgcagggcctgtgagattcttccaaggcctcccattttgatggggtccccaggcctccaggcctgcactggagctggtctgcttccaggtggagccaacggagggtcctggtgcgggggagtcggcgttggcgggtgattgatggtttaatatctcgcgctgcgacctgggcccctcctctcccacgcctctgtgggtggcccccagtgagaggcggagatgggataattcggttaccaaaaagagaatgaaaattccagagagagaaagagacagagaaagaagtgcagaccagggagtgcgctgggagctgatttggcagggctgggcttggatgggagggaggaggccgactctcaaatccggaatccctctgggggcctggggactcataggtcccagccgtcttcaactcccatctgacttcctgtcttgagaacagagacagcagatgtgacaagtgagaggtcacaggcaggggcaaggcctcagaggagagggaagcatgtggcctccgcctgggacaactgctagcaggtgaggccaaggggaggtagggactagtggagttggggtggagggaatgggagactccaagttcccagctcagaggcttctggtcatccttgactggagtcctctctctctttttttttttagatggagtcttactctgtcgcccaggctagagtgcaatggcatagtcttggctcactgcaacctccgcctcccgggttcgagcaagtctgctgtctcagcctcccgagtagctgggactagaggcgtgcagcaccacgcctggctattttttgtatttttggtacagacggggtttcactgt[140 bp omitted]cggacttcatttcttccccacctccccggccctcacctggtccagcccagcatccctcacctggactgtgcagttccctctacccttgctcaggtctccagcctggccctgaagcctgttccctccgcagcctccagagggcgcgagcgaacacctgatcaggccacgccccctcctcccgctcagaacccggaaggctcccaacttgtgttaatttcccatggttgccgtcacaagctagcgtttttttaacgacgcaaattatcctacagctctagaggtcagagatgtggttcgggtctcacctgcctaagaccaagatgtcagcaggctgcagtcctttcttggaggttttaggggacgatctatttcttgctcatttaggggtgcaagattcagttcctcgggattgtagaactgaggcccctgttttcttgctggttgtctgttccccgtttctagaagttgcctgcattccttggctcgtgggccctccctccattttcaaagccagcaatgacgagtcaagtccttctcatatgacagccttcaactcccctctgccgcccccttgcactttaaggacttgtgtgattagatgatccaaggtcatttccctgtctgaaggtccttaattacctaatcagcaaagtcccttttgttgcatgaggtagcaattcactaaccttgcttctcagggcctggctgtgtccaaaggactctttctcctttagacacttttaagtgtttcacctgtcctctgcctctccctgggcacctgctccctgctcagcctgcctctcccgcaattcaagccagtcatatgcttgacactcctccaggaagcctccctgaagtacccatatttatcaacccgctggagcagttaccagcccctttctcctatcctccccaggccacgagatcttgaaagtttaggatgaggaagtagacatcttgggaaggagggcattattctccttaccaactgcctcactcagagcaaaactccagtcctcacggaggccagaaaacccagctttctccaagcagatgggcctccttactgttctccaaactcaccaaagacatcctgcctcagggcctttgcacaggctgttccctctgcctgagtcatcctcccccagatatccacatggctcctccctcacctcctccaggtctcccttcacttgtgcccctccccagggaagccttctctgatgcacacacacccaatttacaacatccacagactcttattgctgctttttttttttttttttgagacagggtctcgctgtgttgctcaggctggagtgcagtggtgtgctctcagctcactgcaacctccacctccgagttcaagtgattctcctgcctcagtctactcagtagctgggattacaggcatgctccatgacacctggctaatttttgtatttttagtagagacggggttttgccatgctgaccaggctggttttgaactcctagcctcaagtgatccgcccgcctcggcctaccaaagtgctgggattacaggcctgaggctgctgtattttctccattgcactggctacttttggctacaccacagaatattcactccttgttcatcttgtcatcgcccaggtctcccactggaaagtcagctccaaaagggaagttcctccacactgttctctcctggctctgtatgctgcccccttccctggcccttggcatacagcaggtgctcaataagtgttagggctgggcgcagtggctcacgcctgtaactaccagcactttgagaggccgagcggacagatttgagcccaggagttcaagaccagcctggccaacatggcaaaaccccgtctttactaaaaatacaaaaattatccaggtgtggtgatgcatgcctgtaatcccaactactcgagaggctgagaaatgagaattgcttaaacctgggaggcagaggctgcagtgagcagtgatcatgccactgcactccagcatgggcatcagagcgagactgtgtttcaaaaaataataataagtgtttgttgagtgaatggatggcaggcaggcagggccccagcccagaggaggatggggacccagtggaaggtgggagcggcaggtggagagggattggtgtggagatgttagagaaaaagaccttctagaacaatcctgggggtcaggtggtccctgtgatgaaatgaaccagcattgtgtgaattcagtcaagggctgatctctcatgatctctataacgtgcttttcacagggaaacgtgtcccccctgccccacaatccccttgataaaatcttagctttatgactttgttctctgttcatctcagataacagatgttcctggagttgccttagtcacagggcagcttggcttcaattcaaaacaaggaatgtccagacccaggctggggccttgatttagacttcaatcctatttccttctgcctctcctccatccccaccagcatcatgttctgggggtctgggtagtgcaggggccccttccttcttgctttcctctcctttcctttcacggccagggctgcagctccaggagggaatatagtgtgtcaaatggtggcccccaaaaaggatgtgtccacattctggcccctgcaacctgtgaacgtgatgttattatattcacttttttttttttttttgagatgaagtcttgctcttgtctcccaactggagtgcaatggcgcaatcaaggctcgctgcaacctccgcctcccaggttcaagtgattctcctgcctcagcctcctgagtagctgggattacaggcgcctgccaccacgtcccctaatttttgtgtttttaggagagacgggctttc[133 bp omitted]ttgctctgtcactcagcgtggctagagagcaatggcatgatttcggctcactgcagcctggacctcccaggctcaagtgatcttctcacctcagccttccaagtagctgggaccacaggcatgcaacaccatgcctggctaatttttgtattttttgcagagagagattcttgctatgtttcccgggctggtctcaaagtcctggcctcgagagagcctcccacctcggactcccaaagtgctgggattacaggcgcgagccactgcgcctggcctgaatgtgatcttaggtggataaactgtaactgtcataggcccattgtttgaggcactgggcaagtcaacatgctgagataccagtttgcagcagagaaggaggtttaatcatagggccacagatcgaggagatgggagcaaatctaaaatccatctcctgggtgggtgtggtggctcacacctgtaatcccagcactttaggaggctgaggtgggcagatcacttgaggccaggagtttgagaccagcctggccaacatggcaaaaccctgtctctactaaaaatacaaaaattagccgggcgtggtggtgcatgcctgtagtcccagctacttgggaggctgaggtgggagaatcagttgaacctgggagatgaaggtggtagtgagccaagatcgcacctctgcactccagcctgggtgacagagtgagactctctcagaaaacaaacaaacaaaaatttataaataaaaatgaaataaaatttaaaaattcatctccccgaggaatttggggctggggtttttaaggggtatggagtgggcccaagtgtggagatcctttgattggtcaaagagtgcaaggtgaagtcttgggacagaggattgggcgggagttgagggacaaggggtgggtgaagaagctgtattctcatgctgatcccattcctatatgcggggtcttcttcagactggttgctggaattcaagatctgcaaaaacatctgaagtgatccttaagcaaaagccatatgatcctgactgggcgcagtggctcacgcctgtaacaccagcacttggaggccgaggcgggtggatcacttgaggtcaggagttcaagatcagcctggccaacatggtaaaaccccttctttactaaaaatgcaaaaattagccaggcgtggtggtgcacgcctgtaatcccggctactctggaggctgaggcaggagaatcgctggaacccgggaggcagcggttacagtgagctgagatcacatcaatgcactccagcctgggtgacagagcaagactccatctcaaaaaaaaaaaaaaaaaaaaaaaaaaaaaaaaaaaaaaaaaagccatatgctcctaatgtcagagatcctgtctgtagaaacaatgggatgtatttgtgttttgttttgttttgagacagaatttcgctcctgatgcccaggctggagtgcaatggcgcgatctcggctcactgcaacctctgcctcctgggatcaagcgattctcctgcctcagcctccccagtagctgggcttacaggcatgcaccaccatgcctggctaatttttgtatctttggtagagatggggtttctccat[137 bp omitted]caaggaagggggccctagtgcagcccgattcatggttcattgtaactgtatttctgtctggaatctagcatgcaatccttgtcaactctgtaggagggattttgaaagggtcattgcagatattagaattctcaagatgagatcatcctggaaaacatggtagtcctaaatccacagacgactctccttaggagagacacatagaggagacacagtagagaaggacctgtgaagacggaagcagaggttggaaggctgtggttgccaccgaggaacgcctggagccctcacaagctggaaggggccaggagggattcttccctagatcctctgtggggagcgtggccctgcagatgctttgatttcagacttctggcctgtagaactgtgagaaaataggtttctgttgttttaagtgactcagtttgtggtactgttatagcggccacaggaaggaaacaaatccgggggtcagatggttctcattgcactgggtctgctgtcagccaaccttgcctctcagggcctagtggtgttcagaatgaaatctttcactttctttttttttttttttgagacaaggtctcactctgtcacccaggctggaatgatgtagtggggcaatcttggctcactgcaacttctgcctcccaagttccagcgattctcctgtctcaggccaagtcaggtggatcacttgaggtcaggagttcaagaccagcctcaccagtgaaacctcatctctactaaaaaaaaaaaaaaaaatacaaaaattagccgggcgtggtggtgtccacctgtagtcccagctactcggaggctgaggtgggagaatcacttgaacccaggatgtagaggttgcagtgagctgagattgtgccactgcactccagcctgggcaacagagtgagaccctgtctaaaaaaaaaaaaaaaaaaggctgggtgcagtggctcatgcctgtaatcccagcactttgggaggcca[132 bp omitted]caagg[132 bp omitted]gctgaggcaggagaatggcgtaaacccgggagacagagcttgcagtgagccgagctcgcgccattgcactccagcctgggtgacagagtgagactccatctcaaaaaaatttatcttccgagtaatgtgcaaaggaaatcagtattcggaagagctatctgcactcccaagttctttgcagcactattcacaataacaagatatggaagcaacctaagtgtccatcaatgaatgaatggataaagaaaatgtggtgcatatacacaatggagtactgttcagcctgataaaagaaggaaatcttgtcatttgcaacaacgtgcatgaatctggaggacattatgcgaagtgaactaagtctggcgcagaaagacaaatagttcatgatctcacttgcatgcagaatctaaaaaaaaaaagtcacattcacagaagtagagagtagaacagtgcttactagagtctggggtcgcagaaaacatgtggcccaaaggatacaaagtttccagtaggaagagtaagtgctggtgatctgttgcacagcaaggtggctatagctaatcataatgtatatttttttctttttctttctttttttttttttgagacagagtctctttctgttgcccaggctggagtgcagtggcacaatctcagctcaaggcaacctccacctcccaggttcaagcaattctctgcctcagcctcctgaggagctgggactacaggcgcccgccaccacgcctggctaatttttatatttttagtagagacagggtt[138 bp omitted]ttttaaatggtctccctatagggtctggtgcggtagctcacatgtgtaatcccagcactttgggaggctgagatgggaggatcacttcagcccaggtgttcaaaaccagcctgggcaatattttacagaacctgtctctaaaaaaacaaactgttcttgctacaaagaaataagtatgtgaggtgatggatatgttcattagcgtgacctgctttataatatatacagtattgaaacatcatatcatagtccataaacgtatgcaattacttgtcaattaaaaataaaaattagggatcagatgtggtagctcatacctgtaatcccagcacattgggaggccaaggcgggtggatcacttgaggtcaggagtttgtgaccagcctaacatggtgaaatcccaactctactaaaaatatgaaattagctgggcgtggtggcacgcacctgtaatcccagctacttgagggcctgaagcaggagaatcgcttgaatccaggagggggaagttgcagtgagccaagattgtgccattgcactccagcctgggcaacagagcaagactctgtcaaaaaaaaaagaaagaggctgggcacggtggctcacacctgtaatcccagcattttgggaggccaaggtgggcagatcacaaggtcaggagtttgagaccagcctggccaacatggtgacacctcatctctactaacaacacaaaaattagccgggtgtggtggtgcgcacctgtagtcccagctactcaggaggctgaggcaggagaatggcatgaacctgggaggcagaggttgcagtgagccaagattacctagtgacagagcaagactgtctcaaaaaaaaaaaaaaagagagagagagaaggaaggaaggagagagggaggga[184 bp omitted]gtggcgggcgcctgtagtgccagctactcaggaggctgaggcaggagaatggagtgaacctgggaggcggaggttgcagtgagccaagcttgcagtgagccgagattgcgccactgcactccagcctgggcaacagagtgagactctgtctcaaaaaaaaaaaagaaagaaaggaaagaaagagagagagaaaaagggagggagggagggagagagagagagagagagaaagagaaagaaagaaaagaaagaaagaaaaaaaagaaaaggaaagaaaagagaaaagaaaagatcttcactgtggtctggcttccattgctagtcgttgtgtctgcctggttgaaatgtccatcttagcattctgttactctatcggcattcagctctggtagtcactggtgtgacattattgcataaatgttcctggccaacagagaaggggaaaatttgtagaagggaagaaagaatggatgagggagcatgggtggaaaacttaagggtggtctgagctatacccaggaagcctgggattgggaaaacccaactctcagcgcccttggggctaagagcaacataaggtttagcagccttagtaatttctttaaaatctaaattggggccgggtgcagtggctcgtgcctgtaatcccagcactttaagagacggaggtgggtggatcacctgagatcaggagttcgagaccagcctggccaatgtggcgaaactccatctctactaaaaatacaaaaattagctgggcatggtggcaggcacctgtaatcccagctacttgagaggctgaggcagggataattgcttgaacccaggaggtagagcttgcagtgagccgagatggtgccactatattccagcctgggcaacacagcaagactccatcttaaaaaaaaaatctaaattggaccaggcatgttggctcacacctgcaatcccagcactttgggaggccaaggagaccagcctggacaacacagcaagaccccacctctacaaaaaactttagaatttgccaggcagtcacaagtcccacccaggtttaggaggtgggaacacaggtcctgtgatatggtttgcatttgtatccccccccacccaaatcttatgttgaattgtaatccctggtgttggaggaagggccaggtgggaggtgattgcatcatggggtcagagtcctcccttgctgctcttgtgatagtgagtgagttcttacaagatctggttgtttaaaagtgtatagtacctccctgctctttctcttgctccttctccagccatgtttccccttggccttccaccatgattgtaagttttctgaggcctccccagctatgtttcctgtacagcccacagaaccatgagccaattaagcctcttttctttataaattacccagtttcaggcatttcttcataacagtgtgagaaggaactaatacaccccgcctctcacgagaggagcaccagcactttgtaagaagagcctatgcaatacgatcaataccagggctgacaatctttgcaaatcacaacctgtcattcctttctcacttcccagcttccctgttgctatttcctgggatctgctcccaggtcaacaacttacccctgcaaatctttgtctcagggtctctgcctttgggaggacccaaactaagatatcccacaaaatcaatagtgtgtttatatagctggtataggtgtatgtaaacatttagaaaaaggtctgtaaggatacactccaaacagacagcagtagcttctgtaaggagggaactgggatgggggttgagagggttcatgtattaggccgttgcctatatgggtaaatttgctgtaaagaaatatcaaagaatgggtacattttattttatttattttactttatttcactttattttattttatttgagatggagtctcactctgttacctaggctagagtgcagtggcacgatcttggctcactgcaacctcctcctcccgggttcaagcgattctcctgcctcagcctcccaagtagctgtgattacaagtgtgtgccaccacaccgggctaatttttgtatttttagtaaagatggggtttc[131 bp omitted]cttaattgactcacagttctgcgggctgtacaagcacagtgctggcatctgcttggcttctggaaagatctcagggagctttaactcatggcagaaggtgaagcaggaacttcacatggcaaaagcaggagcaggagagagagtggggtggaggggaggtgccacacacttaaacaaccagatctccaggccaggtgcagtggctcaagcctgtaatcccaacactttgggaggccaaggcaggtggatcatttgaggtcaggagttcgagaccaccctgaccaacacagtgaaaccccatctttactaaaaatacaaaaaaattagctggccgcagtggcgcaggcctataatcctggctactcaggcggctgaggcaggagaatcgcttgaatccaggaggtggaggttgcagtgagctgagattgcaccactgcactccagcctgggtgacagagcgagaatccatctcaaaaaacaaacaaacaaaacaactaattctccaaagaactcactcacaattgtgtggacagcaccaaagagatggcgctaagccattcatgagggatccgcccccatgatccaatcccctcccaccaagccccacctccaatattgggaattacagttcaacatgagatttggcagggaaacagatccaaactacatcagttcatctataatatatgattttttatttatttttttttttttgccccgagggaggaagaattttctgaatccctgtggttagtaaaagagagaggcggccgggtgcggtggctcatgtctgtaatcccagcattttgggaggctgaggcgggctgatcacgagatcaggagatcaagaccatcctggctaacatagtaaaaccccgtctatactaaaaatacaaaaaaaattagctgagcgtggtggtgcatgcctctagtcccagctactagggaggctgaggca[136 bp omitted]atgatgactcgtggagacactggccctgaagtagctgcaaccctcttaatacacaggaagaaagggctgggatgcaggaaggaagggctgggaggcaagcacaggcagcccctctgtgaaccctcaggtaggagccaccagccattttactgctgagtttagcatttggggttgttcaagagttcagggcttctgggagactagagaatgccttcatctccagggcactaaaacctcagttacctaatctgtgaaatgggtatgatcatagcaatcccacaaaactgctggtagggttacatgtaattatttctcctttttttctttttttaagagatgggttctccctatgtatgttgcccaggctggacttgaactcctaggctcaagtgatcctcccaccttggccttccaatgtgctgggatcacagtaaattttttcttgtagaaacagggtctccctgctgggcacggtggttcacacctgtaattccagcactttgggaggctgaggcgggtggatcacctgaggtcaggagtttgagaccagcctggc[140 bp omitted]ggtgaaaccccatctctactaaaaatacaaaaaattagccaggcgtggtg[132 bp omitted]caaaaaaaaaaaacaaaaaacaaaagaaaacaaaaaattagctgggtgtggtggtgggcacctgtaatctcagctactcaggaggaggaaaatcgcttgaatccgggaaacagaggttgcagtgagccgagatcacaccattgcactccagcctgggtaacaagagcaaaactctgtctcaaaaaaataataataataaaataacaatggattggttgagagatcaccgtatgccagaagttgctttaagcattttgcatgtattaatccattttacacctcacaatatcgctaccaagtagaaacgattatctcgattttgtaaaaggtgaaacaggaaaaaaccactagagcagagctggcagaccctcaaccttcttttccttctgactccaaatgacagacagcattctttccatctctcacctcctcatgcctcctgtggaaaaaatgaatgaacagatgagaaaagttggagctggagaaagaccgtgttcctcgtgttctgtgagacctgggaaggctgctaaaacccagggagcaggagttctcctccctccatccttatccacagtctgggtcccatccagaccctcctctccaaaccgggggtttgcgacaaagcaggtgagggaggcatttcattccagagcagaagaagggggttcctcccccatcccactcccgtttcatttttaaggggaaaagcagctccccatacggtgaggcaatgaggcggaccagcaggttcctggggatctccgcagccccgttgccataacaactgaactcactcgcagcctctgataggggagtcagctggaaccacagcttgggcaggaaacggatgagggagtaggaaagaaacttcaagatcaaccactggccctcacaccgagctgcgcacaccccaaggccaagtgaggctggaaacccttgttgtccttgggaaatgggggagggcactggtacccctgggacctccctcctgaatctgggcaggtttaaacattttttttccaactttggaagacagttgtacaacctcgaaggagaggaggtgtcaggattcacaaagcgtatggatcacacatggctctaggggacattctctttgctctgttttatttttattgtatattttattcttttattttgcgatagggtcttgctctattgcccaggctggagtccagtggcatgaccacaccttactgcagcctcaaattactggactgaggtgatcctcctgcctcagccatgcgagtagctgggactacagacatgcaccaccacacctggctaatttttaaaatatatatgtttttgtagagatagggtcctgctacattgcccaggctggtctcaaactcctggcttcaagtgatcctcctgctttggcctcccaaagtgttgggattataggcatgagccactgcatccagcatcatttcttttcattattattatgattattattttgagatggagtctcgctctgtcacccaggctgtagtggagtggtgtgacctcggctcactgcaacctccacctcccaggttcaagtgattctcctgcctcagcctcctgaggagttgcgattacaggtaccctccacaatgcctggctaatttttttttctttttgagacggagttttcctctgtgtcccaggctggagtgcaatggcgcgatctcagctcactggaacctctgcttcccaggttcaagcaattcttctgcctca[134 bp omitted]caaagtgctgggattacaggcgtaagccaccgtccctggcctaacctggctaatttttatatttttagtagaaacggggcttcaccat[137 bp omitted]agggctcactgcatcacccaggctggtctcgagctcttggcctcaagcgatcctcccatctcagcctcctgagtagcttggattacaggcacaagccatcatgactggcttcctctttttttttttttttaatgaatatggtaaagtgcacaaatcataaatttcagcgtggtgaatttctacacatgtatacctgtgtatccaccatgcagaccagaagaacatatttgtccctccaggaaattcccaaatgctctttctcagtcaatatcctccaatttgacattttcatcatagattagttttgcctacccctgaactttgtgtaagtggaaatacatggtttggcatcttgcttttacgcaacattgtatctgtgagaatctattgtcatgtctgttttcctgttctttttctttgttgtataatattccattgtggagatgtatcacaatgtatttatcttactgctgatagatatttgagttgtttgcagtgaatggttattgtagataaagcagctatgaacatccttgtacatgtcttttgatgaacataagtttacctcttgtggggatgtggacagggtctcactcagtaactcaggctggatcgcaggaacctggctcactgtagcctcaacctcccaggctcaagtgatcctcccacctcagcctcccgaatagctgggaccacaggtatacactatcacacccagctaatttttttgtaatttttgtagagacagggtctcgctttgttgtccaggctgctcttgaacccctggttcaaactatcctcctgcctcggcctcccaacatgctggggttacagacatgagccactgtgcccagcatcttggtttattgaatgctggcgacctgccaagaactttacatcagttatatccttacatagtcacaacattatttatttaattcactcattcaacgcatatttgaaaatctagtaggtgccaggtattgtgggacacaccgagaataagagtcaaggtttataaattttggccaggcgcggtggctcacacctgtaatcccagcactttgggaggccgagacgaacagatcacttgaggccgaaacaaacggatgatggaggccagggcagaagccaggaggctgtggccaaggcaacctcagtaaatccaggcaagtgatgaaggagttgggaagcacaaacgtgaattcatgttctctctctctttttttttttttagagacagggtcttgctctgttgcccaggctggagtgcagtggtgcgacctccgctcactgcaacctccgcctcccagttcaagggattctcgtgcgtcagcctcccaagcagctgggatgacaggcatgcaccaccataccggctaatttttgtactttttttttttagtagagacagggtttcaccatgttggccaggctggtcttgaactcctgacctcaagtgatccacctgccttggcctcccaaagtgctgggattacaggtgtgagccactgtgcctggcccttaacttgacttattttttcaaaaagttttttttttttaatttgagacaggggtttggctatgttgcccaggctggtctccaactccttgcctcaagtgatcctcccacctcagcctcaggttctttgaacataattattcccaaattacaagtagagataactgaatctcagagaggttaacttgcctaaggtcacacagctatgaaatggagaaagggtaagaaaatccgtctgaccttccttcagttatgcaaaagatgtcatgtggtgggtggtgtgacctcagaaaacctagaggagtgggggtccaggctggtggtggggtaaaagacccaagtgaacacacctgtcctgctggggtaactactcacccctaggccacagggcaagcaaagtggcaagccgcaaattgaattggggggctggagggggatgtttcattgatgtcacaaatgagcatggaccccatatctgcagcagggatggttcagggccagtcaaggagatgatcggggcccacggaccctcaaacgcgtcaggaagccaggttggtccctgagtgtgtgtgatggggtgtgtgtttgttgggggaactgccgccgcccgccccattagcagcaccgtcattatcccagatttacgtatgtataatttttcttcctccccctccccaaaccgctccaacatctcccctggctgcaaacccgcctcccccagaaacagccacggagccgcctgccaccgggccattagcacgcagggaagggggtgtggagggagggggcaggcagcagggaaggggaaagggggagccaggagaggacgagggaggcaggagctgtatggatgggagtgaggcggcaagatggaagagaagaggggaaggaaacagggcttagaggagatggggaacctctgagggttctggggggagggggggacacgtgtcccagaggacctggccgcagacagagggccccaggggcagccgagggtctcctgcgccctttctggccaatgccagggctgagaatagggaggtgggggtcccatcggccgggactctgtggctgggtctcagcccagaagttactagagggcctcgcgccggaacccctcccccactctgggaacctccgcctgcggggtggggtgggggtctccaggctgggcgcggggagggcgccggctgcagagctgggagcccggagcgatgactccatcaccctccacttttcactcctcacccccgaacctggccccctcccttcttgcgcccctcgggttgggggcgcgggagagccccctctattacgagggaaatcattgccgcattaatgcgaggtttccaggcaaggagaggggatcgcttcataaaagatgcattgttcccattgcctgcacgcggctccctccccagcatcctgcaagatggcggcggccccagggagggagggggaggggctggggggagcgcggccccctctctccggctggggaaggtgggaagagcggccgggataaaggaagggaagggagagagggagggagggaggagggggctgggagggtgagagagcggtggggaggcgggagccagtcagagggaggagggcgggctggggaggaggagagaggggatggctgggaactcggaggagggaagaggaacgaagcccaaggaggtggcacgggggaggcaggagagcaggccggggggttgggagtggggggcgctggggcctggaggggggcaggcgggggtgggggcaaaaggggagggaaaggggagaaaaaggccgactgggcagcgtgaccaggagagaggggaagacagtaccccctcaactgtccctaggctccaagcccccctccagcggggccccttggttctctctcttggtccccgtacaccctcccgccgaggagatgatccagggagcccccattttctggcatggaggccgctgcaccccattggcttgcctccctaccctccttcctgccttggcaccacggctgccatgctgagagggatcaagcctcctccatctgcctcccaagtcaaggcctccagagttgacccgaaagagctccttaggaagaaactgccgtttgggcacacctgcatccgtcctacctgctggggacggttccagaaaccagacagagtttccagagagggaaactggggcagaggacagccgagaactcaacacgggggggcagcgccccacccgtgaccccagaccaacctcagcccccctcctccccgccttttcctccatcctccgcgggcaaccacgaagagaatttcaaggccccccacttcccagccttcctgcttcgcctaggggagctcccaaacgcctgaaaatatctttaaattaggaaaaagagctaagccgccagagtcctttggtctattaaaggaagagcagaggccaccggcgcccccaccccatccccagcccggttttgcatttgaagccctgaccgcggatctagccggaacaatgaccgggcctgcccagccggccccagctgaatccctttcagtggtcctgggccccctgccaggtgtgccaaaatgaggacggctcccctcctaggcgcttttcatcccctcggggctgctggggcctcagaggcgctaatgaagcgcctcttgccgccctccctctaggaagagggggcctgggggagcgggaggcagggccacattgggggcaggcgcctggaaatctgccttccaagaactgccccaggaacatgtttttgtgccttggtcagcggcagctccctccctccctgctcctcagggtcctcccacaggttctggtgacatccacctcctccaggcagccctcccagcctgctggcattggctccctactgtgtttcctttggagttcggcagtgggggcaggctgcctggattcagattggagctccattgctttctggctgtggctcagttagccaccctgagcctcagtttccctacccgtcaagagaggagaattataaaaacctatgtcatgagactgttgtgaaggagtcgctgtgtgaagaactgtggaaggtcacacgtgcaaagtgggtgcaataatccctagactttcgcctcagccacaggggcccctcactgcaccccagacacacccagtgtgtgcccatttctgggacttcccactggctgttctctttattttatttgtattttttcttttgaggcagagtcttgctctgtagcccaggctggagtgcagtggtgcaatctcggctcactgcaacctccacctcctgggttcaagc[134 bp omitted]cggtctcccaaagcgctgggactacaggcatgagccaccgcgccggccttttttttttttttttttttttttgagacggagtctagctctgtcgctgaggctggagtgcagtggcctgatctcggctcactgcaagctccgcctcccgggttcacgccattctcctgcctcggcctcctgagtagctgagactgcaggcgcccgccaccatgcccggctaattttttgtatttttagtagagacagggtttcactgtg[137 bp omitted]tagagcatagtggtgtgatctcaccgcaacctccgcctcttgggttcaagcgatttctcccacctcagcctcccaagtagctgggaccacaggcacatgccaccacacctggctaatttttgtgtttttatagagatggggttttaccatgttggccaggcttgtctcaaactcctgacctcaggtgatccgcctacctctgcctcccaaagtgctgggattacaggtgtgagccaccttgccaggcccagtggtccctgttatttaccatcatctgtcttacagccagctgacattgtattacttacctgaactcaggatcttaggctctcgaatccaagaacctgggttcaaatcccagcttcacagttattagctgtgtgacattgggcatgttacttaacttctctgagcccctttcctcatttataaaatgaagatggtaataaaacccacctggagccgggtgcagtgtccggagtctgtaatcgcagccactcaggagctcaaggtaggagggtccctttaggccaagagtttgagaccagcctgggcaacatagcaagaccctgtctctaccaaaaaaaaaaaaaaaaaaaaaaaaagccaggcacaatggcttacacctgtagtctctaaaaaaaaaatccacaaggccgggtgcggtggctcaagcctgtaatcccagcactttgggaggctaaggtgggcagatcacctgaggtcacaggagttcgagaccagcctggaggggaggttggagtgcagtggcacaatctcggctcactgcaacttccacctctggagttcaagccattctcgaccctcagcctcccgatagctgggatcacaggtgcctgccaccacgacctgctaatttttgtatcgttagtagagacggggtttcgccatgttggccaggctggtctcaaactcctgacctcaagtgatcctcccaaggtgctgggattataggcatgagccactacgcccagccctacactttggatttaactttgattcctgctcatatgcagagtttcaaactgcttaaatgtctgcaacatttagctgcaaggaagaaagcttaacacaaagtcctccagggagcaaaaaactgcatcactacgcccagcaaatttttttgtattttcagtagggatggggattcactatgttggccaagctggtgttgaactcctgacctcaggtgatccgcccccctcagctcctaaagttctgggattacaggcctgagccacccgcccagcaacaaggctaatttgagggtcacttgtttgatggcttttcttgcccatgccataggtcagaactaggataagcagagcaggtcatatataagctgtgtaagtctcttggccgctttgtaccttagtttccccatttgagaaaaacgaatggatcttaagacacacttttcagagttcataatgggcttatacccagctaaccaataattgtatgagtttttatacaaaatagttgtttacacgtattcatcttctatttcacttacaagttgtgtaaaaactgcattccgtgccaggcctgaaatgttccaaggctcagttctgtaattaaattgcagcccagatttctacaaaaaaagacataagccaaaggaaaaaaaaattatttcagaacatttatcatttgctgtgagtctaatttacataggatggaacatcacctcaatcctttctctgtgcactaaggcaatctcactgtggaagatactggcttatgatttatactttaatattgcacacgtgatacattagctacaaaacagtgaacgctcagtaaatacctgtgttaagtgatcttcatttctctagaacaggatttcacaacttcagtaccatcgacattttggactatataactctttgccgtgggggtttgtcttatactctgcaggatgtttagcagcatctctggcctctgcccaccagatgccaggagcacaaccacagttttgtcaagcaaaagtgtctctggacattaccaaatatcacctgagtacaaaatcacaccagttgagaaccactgctctctgatgattcactatgatctgtgtaataattctcacactaatctttgctagagacaagaaggacttgctatataattttagtacctttctactggtcaaattttaatcatatttcaaaatgaatagcaaagaggtttataattaagttttataaaaattccaaatgtaataaagttatatttgtaacttacatatactgcaaaaatggtagtgattcaaatgtatgtctttcaatatatcgtattttattgcaggataaatctctaggaaaaataaaaggaaaatattgccttgataagttatcagtgttgactggtatgaataacagcaagagtttagaataatattgaatacacatttttcatctcgactctaaacatttggacctgtatttgaactttccagagctcctaaccctgcctgtacctctcctagagtctcaccttcatacttttaataaacaaaatatacaacttaatagactttggaattaatttttcctgagagcagtagacttgattagatgcccttttgtagtctcatcaaatcctagattatgagctcaaagcttttatctctatatatagtttctaatattaaaacgaatagcctcacatttatacaccttcctagtttagctttgttttcctaagccagttcagtatcagaataaaagacatcctttcaacagcatttgaaaggaagttacccctttacttaatacataactttgaactaatattcaaatcatattaatacaattaatttctatcatattaatagaaattcatttttggttttatattgctttaatatttcatgaaagcaatttcttcagttatacagagatggggcttttccctccctctttacctggatggtgtaacgttgtctggctgatgtctccatctctagtctctcccttcctaaactatcctccacacagtcatcatataaactctccagaagtggcttgcaaagaccagcacctcctgggaaattattgaggatgcaaattcttggtcccactctagaccaactgaatcaataactatgaggacggagtccagaactgagttctaacgtgccctctcaatgactgtgatgcagatccatcttacagcactgctgtgataacatggttccccatcatggctcctcagcttggcattcaaagccctagaagatctggctccaatttcctactctccctccttgtaatctacaggtactcatggcattcctcgaatactttcctgtgttttgcccttctcccatttcccttttgcaagtttagaatattgtccccaagatgtctgtccgatgctacacaatggcccttcaaagtcctattcaaatgggattgttctagtaacagcttcctgggtccaaactgaagtcattttcccctcttctatgcttcagaaacaatttacccctcctagtgcccacatccatttcttcttcttaatgtagttattgttcatcccattttttctgagcataaactccttgaaagcatggactaggtcttgctcatctgcattgcccaccatgtttaaaactgacacatggaaataaagtaaattaaaatatttgtaaaacaaatgaatagctggccgggcgcagtggctcatgcctgtaatcccagcactttgggaggctgaggcgggtggattacaaggtcaggatatggagaccatcctggctaacaaggtgaaaccccgtctctactaaaaatacaataaattagctgggcgtggcggcgtgtgcctgtagttccagctactcgggaggctgaggcaggagaatggagtgaaccagggaggcagagcttgcggtgagccgagatcgcaccacagcactccagcctgggtgacagagcaagattccgtctcaaaaaaaaataataaataaaaataaataaataaataaatgaaaagctgggggagtgagtagtaggaaaatgattattttaaagcaaatgtagttttattacttcatggcctctgtagcactttggcatccacttgagggtctttacacccactttccttaagcctttcacatttgaaagaatctgtctgcaaaagagcatcactaataaggattaatgacatacacacctctgcggacagaggataagaatcaagctttcatagcaattgaacatagtatcttcttgtctctaaacagacagaaatactatgcaggtatccctttcttggtaacagggctggggagatagttactgtgtaattagtgaagagttaggggcatttctgatatgcttcttactgtaaacatttctagctctaccacttaaccatcattttaaacatctgttttaatataacaattcctgaaatgaaatccttaatactagtctattctcttggtagcttaatattcttgataatattatttctataattcagctgatttcaaatatttaaatgttaatttaatgcgattaaattaccaaaaaattctggattaatgatgttcaaatgaatgtaggtggtctatattttcttctcctttaggcaacaatctgaagttaactttaattcctttcatcctactaaaccaactttttcaaatcgttttttgtgaaggtcagacagtaaatattttaaggctctgtgggccacatatgatctctctcgcatatttctctttcttttttctttcacagtcctttagaaatgcaaaaaccattcttaataggctattaaaaaatagaccttaggttagatttgatctactggctgtagactgaatagaagaagatggtatgtaaacccttataaaacaaggttcatatgggtgtcagtcactgctcagatcttcttaccatgtgaaattttttctgtctgtattttgtctatacaatttaaaaactgaaaatgcataggatgtagctaatgctagagatgggctgagaccctatacaaacttacagaattgcagaattttattgctggaagaaatcttagagattatctaatttgaacctcttattcattttaaagataatatgactaaaaactcaaaaatatgattaactaacttataaatactggagggatagcaggccttcaaatgaatccttatgtaattcagtcaaataattttcactgagaattctggaaaatgaaaaagttatttctaggttaaaatgcaaactacaactatttgctacacaggactatctcctgcatgtggaggaaagctgggtcatggtcatttcaagatgatgggatctgctctggtttcgttcaaaccttttcttccattttcctttttgtgtccatccctctccaccaccaccaccacacacacaggcaagcacacacacacacttgcaagcactcacacatatgcaagcacagacacacacagaagcacacacacacaggcaagcacacacacacataggcaagcacacacacacaggcaagcacacacacacacttgcaagcacacacacacataggcaagcacacacacacaggcaagcacacacacacacttgcaagcacacacacatgcaagcacacacacatgcacacacacaagcaagcacacaaacacaagcacacacaagcaagcacacacacacgtgcaagcacacacacacaagcacactgctccactcttcccaccaaattgtatctttaatgactcctctctagatcataatatacctttcagaatccaactctgggtggcaccaagatcagcagaacctccatttcctcctctcttttcccaaaccttattacaaaagccccacatgggaccatgtcagggctgcaagtgaagccattcaacttttttcccccatcaaaaaaatttgagaactacaatgtgcataaggtgcacataacgtaaatgttgtttatatttaatttaatttaatttaatttaatttctgagacagggtccattctgttatccacactggtctcagactcctggctcaagtgatcctcctgtctctgccacccaaagtgttgggattgcagacatgagccacctcacctggccaaatattcagtttaataattataaagcagatacccatgtaaacattgttacaaaagattattgctagcatcccagaagccccagtgtgcccctttccaaccatattcctctctctaaccctagtaggtaaccactactctgacttttgtaatgactttcttgcttttaaaatgtagtcctggcctggcgtggtggctcatgcctgtaatcccagcattctggaaagccaaggcacatgaatcacctgaggtcatgagttcgagaccagcctgtccaacatggtgaaactctgtctctactaaaaatagaaaaattagctgggcatggtggcgggcacctgtaattccagctacccaggaggctgaggcaggagaatcccttgaacccgggaggtggaacttgcagtgagccaagatcgcaccattgaactccagcctgggcaacaagaacaaaattccgtctcaaaaaataaataaagcaattctcctgcctcagcttcccaagtagatgggattataggcacccaccaccatgcctggctaatttttgtattttcagtagagatggggtttcaccatattggccaggctggtctcaaactcccgacttcaggtgatccacctgcctcgaactcttgaggtgctggggttacagctgtgagccactgcacatggcattgtttgatttttaatttagaacttatgtatgtcttgtctatataagtcaaactaatgatgtgacacaaactgttgtgaaaaatgttactttgaatgtaagcattttttccaaaatcatttatgtgtctcaactaattccttctataaatcaggaagaaaacgataaaacaattcaacaggaaaatgaacaaaggatagaaaactcagagaagaaacacaaatgttcaataaacatataaagatatttaattaaattcatgagtgatcagaaaaattcaaatttggatggaatcccttttattcatccataaattcaacaaaaagttggcaaattcccaacagtgaaaaggtgtggggaaatgaatgctgtcatattctgctgacgatacagtcagttggcacatttttgaggacaattaaaattttatatctacatagtcttcaccccaactcttccatttctagatatctatgctacaggaatacttgcccacgaagcataagctcaacattcatcaatggggaaattattaaataaactatgatgcatccatactatggattatgcaggagtttaaatgaatggggtgaccctctaagtcctaggaaggaaattatgaagtgaaagaatatcatataagtgataccatgaagtgaaagaatcaagttgcaagatgttaccctttatgaaaagaaaaaagattttaaaaaccacacaacaaatctattttgctttatgtaaatatgtatgtaggtaaatggggaaaagtctggaagcatgtatactaaacacacagtagcattacctcagggatgagggagtagggcacaaggagggtttttgttatacctgttattgcatttttatacattaaaaatagaatcacgggctgggggtggtggctcatgcctataatatgagcactttaggaggccaaggtgggaggatcacttgagcccaggagctcaagaccagcctaagcagcataggaagagcccgtctctacaaaaaatacaaaattaggtgggcgcggtggcatgcacctgtggtcccagctgcttgggaggctgagatgggaggatcacttgtgcctgggaggtgaaggctgcagtgagatgtgattatgccactgcactccagcccaggggacaaagtaagaccttgtctctgaaaaaaaaaaaaaagaggaaaaaaaagaatataaccatgtattatttgtatgataaaaaataaatttaaattgcttcttattttagagagagcctaccaaatttaattttaaaataaccataggattgcaatccacagaggctgatttggggcatggaggggaaatatcttttctcagaggtatggacctcaaaattctggaccaagaaggatcttacaatgcagttagttttttgtcatatttggagagaatatactcacagtttctcggtccaactgtatgctttccatacatttccatcaatgtatgaaatatagtttccttggaaatttctgcaaagaaagacagtttatatccttgaataggcacgcaaagaatgaacaggataaataaaagaatcatggcaatcttgtcggggatattcagaaacagaaaataacacctgctttctcatttccagagctatcagcttcccagtttgcacacttcatcaagaaataatgcggggccactggcacaaatgatgaggcatctcccggaagcttaacttcctatccatcccatctcttggacagacgatgccagttaattactttgaatgtaagtattttatccaaaagcacttatgtgtctaaacaaactcctacaaatcaacacaaaaatggtaaataattcaacagaaaaatgggcataagcttatctttatcgataaataagtagaaagaaaccctatgccaggtaacaccaaagctttgccctctgttgaaacatcctaggctttttctttccactcttattacaactgatctgatttagccccttcacactttactcctacattttgctagacctttctattttgtctccctgaaataagcttttccttttgggcactctacgtatggattctaaaataatcctttgcatgtctatacttgaacataaagcaaaaaaaaacaaaataaaataaaataatcttcctgttttaatcatttaatctctcttgcttggaaactttcaatggctttccatacctcattgtgtactctttaagacccaagtaaacttttagcttatccatgtagctttccctgatctccacacctcaaggaccacagattctggtaaattctagcaccgatggtatgcattatctttcaggaattaattatatacaccgccctttttatgcctattctctttcttccctcctatcatcttcatgttctgcggacaatagcatacttggtcctgggtttgtcacaaaatgagtgctacatataaaaagccagggacaaagaggagttctggacataactaaaggacagagtaatcatgttaacagccaacactcctacatatgctaggcactgatgaagtgttccatatattcactcacctaaatttcacaacaatcctatgaaatggtaactagcataatccccagtttaaaaggaggaaattgagtcacagagcagaataacttgctctggatcaccaagctaataaacagacctgggttcaaacccaggcagcctggctccagaatcaattcttaaccacttagagcatcatcactg[138 bp omitted]catggagaaaccccgtctctattaaaaacacaaaaaattagccaggtgtggtggcgcatgcctgtaatctcagcaactcaggaggctgaggcaggagaatcgcttgaacccgggagatggaggttgcggcgagccgagatcgcgccactgcactccagcctgggtgacaagagcaaaactccgtctcaataaataattaaaataaaataattctaaatacattcggctcatcatattgttacattgatgatcttaaagttgattgagatgtagctgaaactggcttccacaaagtactctcatgtggctctgaattttgaggtcatctttctctgtatcaagttttttagatgtcctttctcagagtaaatcaagtttgagtaagacctgcagggatctcttgtgagcacatatattgagttttagtgcataagctttgttttaacttttcactgggtagatgcagctgtcagataagtggcattatgtctaacatataatgtatttccccccatttttaaagagaagaagatacagaaaatgaaaatgaaaataaaatttggtactacagtgcaaaggttcagcttgcagaattaattgactgtctagacaaagattattgggaagcagaactctgcaaaattctggaagaaatgcatgaagaaatccaccgacacatggacataactgaagacctgaccgataaggctcggggcagtatcaaatcctttctggcaacagctaatggcaagaggggcattttctcattttatttttgttaagtctgagctaaactgttggtatgaaatcactgcaaaatttaaaaatagattaaaattttcttttctttcttttttttttttttgatttggagtctcgctctgtcgcccaggctggagcgcagtggcacaatcttggctcactgcaacctctgcctcccaggttcacgccattctcctgcctcagcctcccgagaagctgggactacaggtgcccaccgccac[139 bp omitted]ctggccaaaaatagattaaaattttcaagtacagtcatgcattgtttaatgatggggatacattctgaaaaatgtgtcatttggcgatgtcccaattgtgtgaacatcatagagtacacttatacaaacctagatggtatggtttcctatacacctaggttatatggcatagcctattgctgctaggctgcaaacctgtatgtcctgtgactgtactgaatcccgtgatcagctgtagcacaacggtaggtatttgtgtatctaaccatatctaaacatttaaaaaggtactacataaaatcttatgggatcaccgtcatgtatgtggttcctcgtggactgaaacattgtgcagtgtatggctgtgtgtatattttactttagttctccatatttcattttccgaagagaaccttgttcattcccacataaattagggatgctatacattttagtgttttatttctgccttgggtcattactaatattccccaaaatgttagtttttttctttaattcaagtatctttttaaacttttttggcattccagcttttaagaaataatattttttgaactttttgcctttttaaaaaaataaaactttaaattttagaataattttagatttgtacaaaagttgcaaagatagtagagggtttccgtatatcctgtacttggttgccccagttattaacatcttagattagtgtgggatatttgttacaactaatgggccagtgttgacacactgttattaactcaagtccatactttactcagatttccttagtttttacctgatgtcttttttctgcctcatgatcctataccacatgatatttagtcatcatgttttcctctagactgtcggtttctcagactttccttgtttttgatggccttgacagtttggaggagtactggttaggtatgttgtagaaagccctccttatgggtttttctcatggttagcctaggtttttgcattttggggaggaagaccacagaggtgatgtgcagttctcgtcttatcaagagtgcatgctgtcgtcgtgacttatcactgatgatgttaaccttggtcctctgggtgaggcagtgtttgtcaggtttccctacatcctcccccatctcctcaaacccccaatactgtaagtcactgtaaacagccacacttagtgggtggggagttatgttctaccttcctgaaggggcaatatctacataaattatttggattttttctgcacaggagatttgtttattcgtttattttttcagacatttatttctatgagtatatattcatggatatttattttatattcattgggttataactggttatttattaggttataattcaatgtcaccttatttattttgttactcaactctgcttttctttttatttaagttttaaaaacatacataccttaaaagtttaaatagtataaaaaggtatgctgtgaaaaatgaatctctctccttcataatctccaatctgacctcctttctccagaggcaatcattattgctattttttcatcctgctagatgtattctgtgcatgtttaataaataccacctgtgttttctaatatagccatccctcagtattctcagggattgcttcctgagccctctgcagatagcaaaatctgtggatgcccaaatcctgcagtcagccctatggaacctgctgatatgaaaagttggcattccacatccaagagttctgcatcttgagaatactgtattttcaatctgaggttgattgaatccaaggatgcggaacctttggccacagagggccaactgcagtgccttttaagttttaacttagataaaattgttaggtaagattctgcaagtacacttttaagtgcctggttctgagttctgctcttctgcatacattatctgccatacatataatcctattaattttccccattctccatttgcttaaaaatagaatgtttatatttaattaagacacccagatagctgcatccaagcttgttctcacatattctgcatcaatattcctgtgaattcgtgcatatttttggagaatgataggctctcacatataaatagtgttgggcacaaatatacttcatctgcagaaaaaagcattcttagttactgtgaattatatttattcatatctggtagttggaagtatttctctattagatctgtttagaaaaatgtgtaatttttttattagaaaggttttagtgttcaggagttaggatcagtaattgcaataacacaatcacggtcttactctttcctccatatatatcaaatcataggaaattttattaatttcagccagcttactcccccccttcatttccttttatgaatcatggcattaaaatagacaaatccctttttgctctctcgtgttttggtacaataacagataacaatctttagtcccctaaaaggcaatgtgagatatgattttataaagtatgttgaattagaaatgtttcccagagtaaaaaataaaaatagaaaaaaaaaaacaaaaaacaatcagaagaataaatattttcaagggcaagcttgtctgtgtataaaattatatatacagtataatcataattaaagaacaaaatcaaaacaggaatggataatcaaaagtgttaagtggtctgatttggggcaatgtaaaaaactaaaaatgttaatatagggcaattggaaaatttcattatgaattttcatgtgatagaacactacgtattggagaattaagtaaagtaccatgcaaaaactgtgcctgggtcattgagctacttaaattctcttcctctaaataaccaactggatcagcttttatcgttgaaaaataaccaattagcatagtagaattgtagttgatttccatttcatatttttggcatttcctacaatgagcatgttctatttaagtataattcagcatgtaatgtatgtttaaaaattagttaaaccttttgtagtaatggagaacaacaaagagagcattgagctttaggccacaatgtgttcttagaaagttagatgactaccgctgggcacggtggctcacgcctgtaatcccggcactttaggaggccgaggcgggcagatcacctgaggtcaggagtgagaccagcctggccacatggcgaaaccctgtctctactaaaaatacaaaaattagccaggcatgatggtgtgtgcctgtagtcccagctactcagggggctgaggcaggagaattgcttaaatctgggaggtggaggttgcagtgaactgagatcgtgccaatgtactccagcctgggtgacaaagcaggacccccatctcaaaaacgaaaacaaaacccccaaaaaacagatagagctgagatttgaacccagaaagtctgatacatgagtccgcccacttacaattgctacattctactgcttttctgaagaaacttgagaggtaaagcaacttgtcccttgccagtgaatgaatgatgcaatggggaattgaacccagatctgcaaacccagcagtccttgctgcttcccttatactgagtgctgctggcctcaaagtgtttcttgttctgtgtttctacgtccacgcttacagggaagcatgggtgcagaaatcaccaggccagtcagggaggctgggacgggtgctgaccctagccctggagcactctccctggctgctccctgtagtcttgcttcctcttgtgaagtctatgtgccagccaagacccagcctgtgaggcctgacctgatctctgccccctgtctgttcccccagcaagactccctgaggaaaagaataggggatcacgtcttagccatcagagcatcgaagtgcccaggccaaggttggccacatagagggagggcaggtggcaaatgtttgcaggatgagtgaataaaaggaaaactgatagcaaagaatggaactaccaggcacgattccagggctgggactaaatatttaccttgcctactgggcaaagataagcctggttttccaggctctatttatgccagctttccttcaggggctgacacagtcaacctggtatcgttagtttgaacagcggtttccacatgtggagtctgggtgtatgaggtgcttgatcctcagcttctgccattccctagctccatgtgtcttccccagggaatccgctttccagtcctcgagccctaggaggctttgcacctccattctgctgcctggtctgtccccggtctccatgaggctattgaattggggttcattctactctagatgaagctgtgtatccttgtttagcccctggggtcaagccacatcaggagctgcttgcaacatgacaggacagacttgcctgggtctactgcctcagtggcctcctgggagacacctctcttaatggaatagggttgggtatgacaagctgggtccaagtgaagcttcagagatgtagagatgtaggggaggagggactcttgagttcagtgtggcagccatcactcagcctctgggactcacaccaggggcataaggagaatggaagccacacgtgaaaaagggaagggtgatttctttctttctttctttttggggagcgtgatttctttttttttttttttttggttggggggaggtgggaagggtgattttttttttggtgggggaggtggggaagggtgatttcttttttttttttttttttggtagggggaggtggggaaggtgtttttgtggaaatacgaacagctctgcttcaggaaggcctttgtggagtgtgaagggagcagtgaacaactctggcccctggtgtccagcctgggaggcgatgcctagaggcagtggtcatgttgggcgaggggtgcccagaagatcaggcggtcctgctcagaggacaccacgtggtggctgaaaggactagtttaagagcacatttgagataccctctggaggctgccatcagtacttagagggagagtgggtctttgcagggggataagggagaaccaatgaaacctgaataattacagcaagtgaactttcactgagcctgaggctgctgtgaccaggaaaacacagccagcatagaagcagattcacagctgggcgtggtggctcgtgcctgtaatcccagcagtttgggaggccaaggcgggcagatcacctgaagtcaggagtttgaggccagcctggccaatgtgatgaaaccccatctctactaagaatacaaaaatcagctgggtgtggtggtgcatgcctgtaattccagctacttaggaggctgaggcaggagaatcacttgagcctgggagacggaaattgcagtgagttgagatcacatcactgcactccagcctgagcaacagagagaaactccctctgtctaaaaaaaaaaaaaaaaaaaaaaaaaaagcagcagcagcagattcacggagacacactgcttggaatttggtgatgttcagggagtggggctggagctggcctatgctccagacagccataaactatcaacataaacacaagtacacctaagcctctgcaggcacggtgctgatgctgccccctcccaatggggtatcatccgggtggatacagtccctggatgctgacatttttcttttctttttttgtttttgtttttttttttgttttttttgagacagagtctcactctgtcaccaggctggagtgcagtggcacgatctcagctcactgcaacctctgcctcctgggttcaagcaattctcctgcctcaacctcccaagtagctgggactagaggtgtgcgctaccatgcccaactgatttttttgtatttttagtagagacagggtttcaccatgttagccaggatggtctcaatctcctgacctcatgatctgcctgcctcagcctcccaaaatgctgagattacaggcatgagccaccatgcccggtcaatgcggacatttttcaagtcagctatggagtttgaattttcctccaaatttacactggctatttccccagttcaaattaggcctgactggtttctctttctttttttctgaatacatatcagttttggattgaggcctagcatttccaccaccatccagaggagagatgagaaaaccagagctgggctcacaatcccaggggaaaaaacaatgggctgctctggaatgctgcagaatcagggttgaatgaatgcaggagaggggcaggcagccagcgggcatgccggccgcgtgaccagcctgccatggtatccagatggacatgtggtatttggtttaaagcccacgctactggggcatagtcagctggggataaatgatcagacttaattgttctctcttttcccaggaaaggccaggaaggaaaaggccccagtttaagggagaaggcattgtcctcagtgagtcttcacccactactgactgaagcatagtcaggtagcccagtctggcaaggggccggtggggagcatgagattctcatattctcatggctgctgtggctggtggccaccttcacaacaatagctcactggacccctgtccttcccatcccgcctctgaaatgatcacatctgtgttaaatctctgataagatactatcaggcactccaaagtccagtttggaactagagtccttgcttgactcaatccagagtcctttctccttccctggtcccatctccccatttactccccccaaattcttctctctgtccagctgctaaggtccctgggccaccagaggcaaatagaataaacctaggacatcactctcgatcgagaggcctgcatgactctttatttgcaccagagtttctcatcttccaggaacaagaggaggagctgctttgagacccacttcctctccttacataacaacacactgcatttgcacaagtgtccttggttgtaaagggttccacattcattttctcattcagggcttattacaagcctctaaggtagctagggtcatggtgaccctgatcctttgtcaaagatgagcccactgaggctcagggtggctaccgttgtgccaggagttgctaattggtggatcacagactccagttcagggggaggcagggtggtaaagaagcagctagatgaacctgggtttgaatccagctcagaaatgttccatctgtgtgacagcacaggcaagtgacttaatctgattgagcctcagctttctcatctagaaaaaggagtgatcatgcatccctcatagagctgtggtgagcatttacaaaccatgagtgaaacatgcatagcacggcatttggcagatagaagtccagtacatgtctaaggattagtactgattgatttttataatagtcacctggatgatctccaatatgtatatatcaatgtatttttagatcaaaatggaaattcaaaaatttaataatttctgactataccccgagactctgtggatctcatctttttattttattttatttttttgagatggagtctcgctctgttgcccaagctggagtgcagttgtgcggtctcggctcactgcaacctccacctcctgggttcaagtgattctcctgcctcagcctcccaaagagctgggattaccggcatgcgccgccacgcccggctaatttttgtatttttagtagagaaggggttttaccatgttggccaggccggtctcgaactccggaccacaggtgatccgcccgccttggcctcccaaagggctgggattacaggcatgggccactgcacccggccggatctcatcttaggaaaagctagtgtggtgtaggaagagggttaagttccagtgtgacctgtgcacacctgaaggcacaatccacacccacccaccctccacctctctgaccataactcttttgactcccacttcttgtcctctttgggtctccctgagacccactggctacccaccccttcaatgtcaccaggtccactcagggcctcagggcccttgcatttgctgtttctttttcataaaagaccctttcctcaggtatctgcacatctctctcatttccttcaggtctttattcaaattccatctttagtgagtccttctcaggccatccttcctaaaatttcaaccttttctgcaagtcattcccaaatcccaactctgaacattatccttcctcctgtcagtttttctaagtacttttctttctttctttctttcttttttttttttttttgatggagtcttactctgttgcccaggctggagtccagtggtgcaatctcagctcactgtaacctctgcctcctgggttcaagcaattctcctgcatcagcctcctaagtagctgggattataggtgcccactatgatgcccagctaattttttgtatttttagtagagacacagtttcaccatgttggcaaggctggtcttgaactcctgacctcaggtgatccaccatcctcagcctcccaaagtgttgggatattaggcatgagccattgcgcccggctggaccagcagtttaaatttgatttcctagcgagcctacacagcatacttccttgggtggtctagtgctgtccattgtcttatgcaaataaattttctttataaaatcctagaaagcaattattattcttaataaaccatactaatgtgtccttaactgttaaaaattaatacttcatatatcattttcacttatcagatatataacagattttttttccaaatcagtactctgtcacagattcagtaataggcaaaggaaactaagttggattaatcttgaaagaagtcattctaaaaatcaatgtggtgctcaacacatcaaatcaaaataagtctgtaagaattcttacttgtgaattgcttgtggttcctccagagcctgaggtattgggcctgcctgtgactgttgctgtcctgggctggaatgaagtaaaggtttgctgactggtgcctatacttggtggaatgatacccaggactttctgatgtacttgaacaatgccttaaaaaaagatgaagccataattaaaaactgtcactttattggaaagcattacgtggtgctccattgctgagaagaaactacgtgtggcagggttttatagtgggctacacagaatgtgagatccgaggtctgaaatcagtgaaacggagatgagaaataatgccaacagtatgatctggcaaatgtgaattaaaactcttcacatttcccttacctccttgtgttgctggcacatttacagtgacagtcttgctgtttgcaggaagtggcagtttggtaattacttttcctgccatagtgactggattgcctgtaatttggaacgtctgacctgtgctggcaatggttgtagcagatgccgcagctgtgctggtggctaatggggtataagacatttaataagcttcagatttaaaataaccagcaacgtagtgacttctaggaaagggcaccaatgcatgaaatgtggctcattttgtatttttaataaaaacattcctctccactcaaagtgaactacgtaaatgttgaaagtgaaatcatgtaagagacgagtttgctaatgtaatattatgaacattatctgtaacaaaccattatagcttgtttgctcaatcagctgcaaaagaaaaacaatcttctacaaaaaagtttcatttcagtagctaaagggttgaaaattctttttcctgaacaaaagtaatcttttacttaatcatagttgtatacctgaatctgactggccttgcttaacacacatagcaaaggtttgatgaaagttctcattttgttggaatgctactgtagctggagatccaactttagtagttagtaccattttggttccagttgtaactgagccacttatgggggccaccataaccttctgtgctggagagatggtactggttgcactgttggttgaggaagtggtggaagttgcaatcactgtcagcttctgctgctttaatcatttctaaaaaagcgagggagaggaaacatgaatcaaaatagttcaaaataaaaacaataccattctacaagaagtctgtccacaatttctctcaccttaagaaactacactatatttctgaaatattttacttccaaaaagaatatatgcccgtataaatgtacctgagtttatggctggcctcagtggctcacgcctgtaatcctagtactctgggaggctgagatgggcagatcacctgaggtcaggagtttgagaccagcctggccaacatggtgaaaccctgtctctactaaaaataaaaaaattagccgagcattgtggctcataactgtaatcctaactacttgggaggctgaggcagaagaattgcttgaacctgggcggcagaggttgcagtgagctgaggtcatgccactgcaccccagcctgggtgacagagtgactccatctcttaaaaaaaaaaagatttacctgaatttaatttcttgataaaggccatatatatatttttaattcctccaaggtacctatctatgaaggcagtatttttatgtctctgtatcacatatattacattaaaaatactaagttgttcatagcagaaaatttaaaatgatcaagtttttctggcttgtacaaatattcaaggtttcagactgaaagcaacagagatgtgggtaatctactggagacaggaacaccatgctgcccagcagtgagattcagagctgagaacaaatggagctgcgaaaggtttctgtttcactgtaatgctaatttttccaactatagaaagcatgtcaatagttaatgacactattattaaagttggcaaacctgcaatcaagaaagctgaaaattataaaatagttttcctagacttcttatattattccttcaaatatttttacagaaaaaataatttatactatacagagtagtataatatgatctttaaaactacagttattaaagacactctgtatatcctttattatagattgctaaacttttctaacagcttatcaacagtggtgtgatgagtaacagtataaccttacacatgtaaaaacaacaggtgaaatttacagcaaacctggtggcagatgctttaccttcagtatcttataagctgaggaaatggagattcagaaaggttgtgtaaccggcccaaggccacagagctagttaagggtgatgctgggatgcctgctaaaatcaaattccaattctgcgctatctcctgcctttgcaaagtgctcacctatgacatcacatcgaatttttttaggactacttttgtacctatcttatatacctgaatataatataaagtacattacacaattcctcattcttcagaagaaaaagagtttagttttcaacacttagagatctcacctgattaaatcagttaaaaaaaaaagaaaaaagaaaagaaagagggaggcaaaggtgtgtgtggtagtgcatctatagctccagctactcaagaggctgagaccagaagatcaccttaagcctgggaattcaaagttgcaa[132 bp omitted]tgccttcaaagttgaagtgttagctatcttcgtaaaaaagaattttaaataaatttttaaaagtaatatattagggccgaatgcagtggtgcttgcctgtaaacccagcactttgggaggcctaggtgggcagatcacttgagctcaggagttcaagactagcctgggcaatatggcaaaacttccatctctacaaaaaatacaaaaattagctgggcatggtggtgcatgcctgtagtcccagttacttgggaagctgagatgggtggattgcttgagcccacgagattgagaatgtagtgatccgtgatcatgccactgcataccagcagcatgggcaacagagttagatcctgtctcaaaaaaaaaaaaagttacactgcagaaattagaaaacacaacaataaaataaaaaacaaaacaactagccggttgttatagatatttgggtttagtaatgaatttcctgtgacagatagcatcatacgtagaatccaaacgtgctatcatctcaaactttgatgtaagtgaaggacctatggtaaactgaaaga[224 bp omitted]gaggcaggagaatggcgtgaaccccagggggcggagcctgcagtgagccgagattgcgccactgcactccagcctgggcgacagcgagactccgtctcaaaaaaaaaaaaaaaaaaaaaaaaaaaatgcgagggaaaagtagtttgaaacaaataatttggtttatatgtgatttttagatagttatgtataactatgttaataatattgtatatagtatatctattcatctgtatcttcaatgtttatatactgaagttggtaaaaactttttttacaacaaaattagtcacttttatttaaaagaaacattacaaataagtgtgcaaaattaaacatcatgattaaatacacataaaaggaacatgcatactttacatcaaaatccacatacagagttagttgattacatgacagtaacagtaaaggaactgaaggaactggcaaaaccgagaactcgctgctatgcagattttatatgtttgcaatctgaaatcaaaaccataaaatagggtttctttaacgggaatttaagaaaattaaatatatatcccaaatagctgacaatgtagagcccataacctattttagttaccaaatgttaaaaaaagttatgtgcctttccttcctaaaatgttagtgtgtagctattcttacaaatgaggggaggggaagacagtggacttgggggcttggaggccagaccgaggcatttccctctacaccagcgggaactgcagcgggcactacagcgggccctcccagatcctgctctgccagacgaccctgaagttaaaggatgttttcccccataacgaatgttcaaagtccgtgcgtcactctgatgttccctacacataaccgggaaacagatttaacccagaatgtaaccaggagaccccgcgtccccgccccgcacacgcctgaggtctgacagctcggcttctacggtggcctggtgtccatctcattctaatggccccaacagagacggggatgccacgcaagggcacagacgacattacgggcacagatgaccacattgcaggtacggagaagaccacaggctgggctcacacaaggggaaacattcacgctgtgctctctctacagggtcaggtcgtttttcttcatgttcggacgggagaaggaattcctttctccttttctaaggcaagctgctggtgttctatttaaatctgcttataatgtaagaacttacatttgcacacttgttcacttccccgctgcagactcagtaagaacaatggaatctgttgcaaaaacaaacttgaactcatccaccctctcagcccagttcccaggtccgtatggagcccccgtcagcgtgaggatgcggtggagccactgaagctaacatcacagctgaactcatgggaacagccagcggccactcaagctggtcacagcactgagtacctacggtgccttgatgatgattctctctttaatactggaaatgggagtccttaggaaagcagacaaccacctaaggcttcgagaccaaggtccctgggcagcccctccagcccgtggcccaggaggcccctggggctctggcaccagccccgagagcctgaaggcggcaggtggtgggtgctgtggcgcccccagcaggggagtcacaacttgtcatcagtcatctctagaaactgcgcgtagacatctcggatgcactcccccttggggttgaacaggagtttgtagtagctgcagtctgcacaaattgcaatgacggcgtttggctgtgttccaaaggcacaaatgcacggagagcctgagggaacctgaaacttggagaaactccacttgtaactgaagtattttggaaggaaactggctgaggccaaactggactgtttattcctttttagatcttcagctgcaaaaatatgcactgtgccatggtcgctggatacacagatgagggacgcatcctgattgaagttaatgcagtaaatattggctgcttgagatcctcttcgcagttcctgaattaaatgccctgaggaagtatcaaatattcctataagggtccctttctcggatgcagttgcaattcttgttccctgcagtttgagtgcactgcagctcagaacaccctcatgtgcaggaatgtccactggtggcttctctgtgctggccaggtccacaagttgcacatggcccgtgtggtgcccagaaaggccaggagggagttgttactattgggacaaaggacacagaggcctttggggttatagcaggttttcaagatgtgcaaccattggggattgtgtgtgaatgtgaacaccttaattacggagtccaaaaccaccacaattctatctcgccgcagtttgactgccttgacttctgtagaaaattctgtttcaataacagtcttcttcttcaggtcatcccagatcattactttgttgggagggtattttggcttttttccaccaccaattaaagctaaatagttgcagcgaaataacatttcaacatggccaactcctcctttagaaattcttgtttctctttttcatttagtggatcagcgttatagactcggaatccattttccatcccacacgcaaagcatctgtggtcctggtcgaagccagcgtacagcagcccgttgcggtgatggttacatggcaggaggttcatggcgccgccctgctgggtcgccgttcctcagcgctgcatgccgctcactggggccggcgatctggtcccctcgggccagcgctgaggccgccgcggcaggaagtggtaaaaacttttatagtattttctcaataggaataagtgataatcatctttcttccctgcacaccacccccccaacccaacagagttttgctcttgcagcccaggctggagtacaatggtgtgatctccgctcactaaaaactctgcctcctgggtttaggcgattcttctgcctcagcctcccgagtagctgggattacaggcgtgcgccaccatgcccggctaatttttacatttttagtaaagatggggtttcaccatgttggtcagggtggtctcgaactcctgacctcaggcaatccacctgccccggccttccaaactgctggggttataggcgtaagccaccacgcctggccagtaatcatcttttattcgggtgctcaatgttcagcatatatgcacattgtatttttatttttttaattttgtttttttcttttattagagacagggtctccctatgttgcccgggctggtcttgaactcctggactcaagggatcctcctgccttggccctccaaagtgctgggactacaggcataagccactgcacctggccatggaacattatttatagtatgaaaacactaagaaaccatcagtagctttataataatcaattacaacaaactcttacggagttttagcgtaatttgcttttctatatactgcagaaattttccaaactggaaattcacaagaaaaaattattttcagaaattactcatgaaactctaaagataaataatagaaatcttatttcagatgtcctccaaatatgtatactttttacaaaaccacagcttggtgtatccacagagctgttttcaaataatgacaatacgatatatgtgagataaacttaaaaaaaaaccaacctggctgggtacaatggctcacacctaaaatcccagcactttgggaggctgaggcaggtggattgcttgagtcccggagtttgagactggcctggggaacatggtgaaaccctatatctataaaaattacaaacattagctgggcatggtggtgtgtgcctgcagtcccagctactagggaggctgaggtgggaggatcgcttgaaccagggagtcgaggttgtgatctgctctagcctgggggatagtgcgacactgtctcaaaaaataaaccacaaaacccacaagaatatatcattgtgcatgggtgtgcatgaatttggctaaaaaatgtaggtatgtatgttgtcaagtaaaaaatgtatgtatgctatcaagtaaaaaatgtatgtaaaagtgggaccagtaccaactccccccgctgatgggaagtcaagtgctgctgttttgaaagagcctccatttgggccttgacatcctctgccttcttctgttcactaaccttggcctgttgctcaactgcttgtgccttttctttctccactctgcaggaaaaaaaggagaaacttatcagaaactaccctattaggcatctggcatctaatataagtgaagtctggttgactttcacatcatacgaagggatgatattatttcaatattaaaataaaacatttggccatgcaaggtggctcatgcctgtatcccagcactgtgggaggccaaggcaggcagatcacttgagaccaagagttcaagaccagcctggccagcatggtgaaatcctgtctctactaaaaatacaaaagttagctggggctgggcatggtggctcaggccagtaatcccagtggagtttgcagtgagccaagattgggccgctgccctccagcctgggtgacagagtgagactctatcttaaaaaaaaaaaaaaaaaaaaagttagccagtcttggtggcacatgcctgtaatcctacctacttgggggactgaagcaggagaatcacttgaacctgggaggcagaggttgcaggaagccaagatcgcaccattgcactccagcctgggggacagagcaaaactctgtctctaaaataaaataaaataaaacatttatggtaattagaaatcgacaaatgggtaacacattaaaaataagagagaggaccttactaaactatttacagctagcacttaaaatcaaaagtggagtaaagtcaagctaggatacacccctcatctgactaacgtcaattcatcctccagaccccaacacgaatacaacttcctcacacttggatgtacaatatgtgtttccctatcaccacatagagaagggggatttgagagttaccaacataaaggggagatctgaaacctaagaatagataaaatctcctaacaagatttaaaaaataaaaagtagggagggacaagcattgaaacttcccacatacaatcacaaggaagcagcagaaggaaatggaaatggtaataggacctggactgtacaaagccacgcaagccaaagaaaagtgattttaggggattgcagtgatttgtgtcaaaggctgtggggtcaaggagactgaagtcctgtcagttacatctcccatctgtgtctctgcccatcaacagagctctttctgtgccaggacgaccttgttttttgttttttgtttttctttttgttttgagacagagtctcactctgttgcccaggctggaatgcaatggggtcatctcagctcactgcaactttcacctcctgggttcaagcaattctcctgcctcagcctcccaaatagctgggattaccagagtacaccaccaagcccggctaatttgtgtattttcagcagagcccagttttcaccatgttggccaggctggtctcaaactcctgacctcaagtgatctgcctgcctgggcctcccaaagtgctgggattacaggtgtaagccaccacatcagcttttttttttttttttttaagagatgctagaagtgtggaattttatgtgaaatctcccaattttcagaagttggcttacatttttaaaacagtttataggacaaacaaaacaagtttgcagactggaattggcggcaggccaccaagctgcaggttctgacagctccactgtcactgggaggcatctggagctgattccaagctgctacgcccagcatcaggaagcgtcaactgcatgttcaccctccagctttcggctgccacacgctgtgtgctctagttacatgctctgacccgccacagaccacggtggccctccccaaggcccggagtccatgatggcagcctgacatggtgtcagtgagcttcagtagaaaatgggtctcccccaacagtgcagcaaaaagcaacaagagttggggtggggacgtggggaacaacatgctcacatgcagggctctgagctctgtccgctctgcctaattgttcttctcttggtcattggacaaccccagcccctgcagttcctgctctcctcaacagggctgcccagtgagaaatggaccctgtctgctagaacactttaccttcacagatgcaggattaaataccctggcatcacacagtgaggacgttattttcaagtgtcttcaacccttctgatgacctcaagaagaaagtctaggccaggtgcggtggctcaagtctgtaatctcagcactttgggacactgaggttggaggatcacttgagcccaggagtttgagaccagcctgcgcaacatagtgtgaccctgtctctaaaataaataaatcaataaatcaattatttttaaaaagagaaaggctcaggttggtgccagtacctcctctccgccagtgttgattgcattttttttttttttgagacggactcacattgtcactctggctggagtgcaaaggctcactgcaacctccgcctcccgggttcaagcgattctcctacctcagcctcctgagtagatgggattacaggtgcctgccaccatgcctggctaatttttgtattttcagtagagacggg[135 bp omitted]tttctgtcacccagactggactgcagtggctattcacagacacaatcatagcatgctactgtgtggaactcctgagctcaagcaatcctcctgcctcagcctcccaagcagctgggactacaagtgcacaccaccatgcctgggtctgatctcacttttaacacaaagagggcaggcttcagactcagaactttgagttgactgcattatcccatctggaatataatagtagttgagagggaagcaggctcaattcaatcaggctgagcacctgcattcttttaattatatacattgcagggacagagcaggtgtgtggattctggagcaaaacaatgggagactgtaagtgagtattttagctttttcttcctgatagctttatatacacctgcagagttaccacagcaacctagcagtgattgccttcctccccctaccttttttatgtggcaaagttacggaacataaaagttatcatttaaaccatttggaaatgtgcaaattactagcattaggtacattcacgttgttatgcaaccatcaccaccatccatctccagaaccttttcatctccaaatgaaactcccattaaacactaactcccctttccccagtcccctgagtccatgggggacaccaagtcagccctcagccctgctacggtttcctgcacctcctggaacctccgtctccttgttgataagcgaagtgggatcttggtacttggcagggttgtggtgatgaccaaataaatgaagcgtgtgaagcacttagcacataaggtgaatgttcaaagcctgatggctgccctcatccggccaggatctgcacctccctcccaagatcactaagtccattcccagaagggaagctatgcattgattgcagtgacccggtaatgccttctttccagcccacatgagctctggcaatgcatcacgttcaatgcttgcagcatgtggacagcctgtgacaacactctagtttccagtgtgaatgtagatttccacttcccgcccacatcccacctttaaaattgttggttgttatttcggtcagtttctaggctgggaggcagagccgcactgaagaagtagacacacccttctcagtcaccttctcatcatcaagtaggaactgagcatctactatctttctcccttgagcaaatggctggacaatacccctcaggagtagagctcatcagagggagggtgcgggaggcctgggttctgaatcttacctatccctcctttgctggggtattgagcaagcctttagtgtggaaggaaacaggtcccgaggcatggaggacgtggcctgggattttccatatttctgtaacagcacaactatcactgcagccaggtcatttatgatggccgctgggaggacaatgagaagcagctgctacctgtggaaagaactgtaggattttagttgatgagaaccactgagggatgtggctgcaaaaataataaaataatcttaagtcatatcactagtggtagagtgtgtagaaacaagggaggtgaaagcccccactgcagtgtgttggtcagattccttgggggacagggtctaggtctgggcacatgccaggaggcctggccaaagggagagatggtcactcactgcctactacgcaggatcatgctacgtgctttacatgtgttctctcatttcacatcagggaagtcatgtgagaaaatatcacccccatgtaagcaagggaaaactgggggttactgcagtgaagtagactgcacagggtcatcccacctggaagtgaaggagcttggaattagggccaggcctggctgactcccaaagtgtgtgcccttgttggacactgcggctcccctagaagctggcgttccactctttcataccatgttacattcttctctggggatccccagatacaaaagagaatggactcggcgttccttcctgttcagcagagcagcccccactactcattccctgccacccctctagaatcagccctggatgagagacagttgataggactaggagctgagctgtgccattctgggcttcccaccccccaggcacagaaaacagtgatcaaaatgaaaccacttggcagaaccctcctcactccctagtgacagagtgcagtcacctaggcccatgttccctgcaaagacgttgaggtccatgaaagtaggtccatcccatgagggggcatctgagaagacaggtggggtggtgctgtggtgagcagcacagactccattgcgggactgcctgggctgagtcccggctctggcactttactgctgtgtgattgtgggcaagttgcttcacctctctgtgcctttgtttcttcccaggtagaatggggattattatttgtacccgcttcataaaactgacatgaagttaaatgtaaggcacctagaatggtgtccagcac[131 bp omitted]tatggtgaaaccttgtctgtactaaaaatacaaaaaattagccaggcgtggtggtgggtgcctgtaatcccagctactcaggaggctgaggcacgagaatcacttgaaccctggagggggatcttgcagtgagctgagatggtgccattgcactccagcctaggcaacagagcaagactccgtctcaaaaacaaacaaacaaacaaacaaacaaaaaaactctgtgcacttcctccttgatgccatgtagcccagctgtatatccatcttaccctttggaatatgagctgcttaaggctgggactgtgtccaattctctctgtaccccagtgcccagaggagtccagcacttacttattgtctgtggtgggcattgaattttccaaatatttctggttccaggtgctctttcaacctcttgctgcctcctgtctagaggtgaggtccctttcccctccccttgagcctgggtggtgctcatgtgattgcctcaagaaatagaatgtggtggaaatggcactggatggcttctgaggctaggttataaaagggatgtaagttccacctggctctcactgggaatgctcacccttggactccagccaccatattgtggggaagcccaacccatgtggaaaagccacttgcaggtgttctagtcaattgcctcagctaagatcttagccaagaggcaatattaagcggtagacctgtgagttaagaagccttcagatattccagccccagcctccgggccacctgacttcatgccgagtggagcagagatgagctctcttcacctagccctgcccaactggcagatttgtaagccaaataaaccctgtcattgttttaagctactaagtggtagaataacgtttatgcagcagtaaataaccagaacgccaactagctaatcagccctgggagtgtcagctcagcagattaactgtggtggctggttgctctggcaactgcctcagccatcactttgggtaagtccaaaacagagggaaggggctgctgggtgtgggggagccgacaaacttgggagccaggctgctattatcacccttagcctggttccactgctccacacatgcatggccctgggcaggtctctgattctcagatgtgtccattattcaacccagcaagggctgttgggagcttgatcagaggtgccagacagagagcgatctggtgtctggtaaatactggtttctttcctggggagggtttacagtgaatgaagggggctttgttctctgaacacacggtgtgaaggataaaagaagagcaccagtgtgggccagcgacaagaataaaatgggctggggccagaggctgcaaccagaccaggtgcgacctccatgaggcaaacatcgctacctgccagctcatcatttgtccttcccagctggtctaggagctgaacccagaggcaggttcatcgaggagctaatacagcttgagcttcagggcccttctctgcatgagcaatgtgttcacatgctcacagacttctctaatatttgcaaaagttaaaatgttttaaatggactgacgctaccatcttcttccactccaacttcccctccagcacacttcctcttgagtcaggtggtggtggagaggccatgtacattttgggaatcttgctaaggaattgagttgggcaacatgtattgtaggtttagcaggacaggtctatgtggttcacagccacttccatgaatgactcagttattcccagctgttaggaatggcttctagaacactcctctgccaattgcgccaacccacctggatccagatgcaaagatgcagggccggaggctccaaggagcatcatgaaggaacatgtcccatggtgcctggcacccaaagtacgtgggcaatggagaataaacagatcaatggaaagacagaatggtcattctattttctttatagaaaatatgttaaaccctggccaggcacggtggctcatgcctataatcccagcactttgggaggccaaggcggacagatcacttgaggccaggagttcaataccaccctggccaacatggtgaaagcctgtctctattaaaaatacaaaaattagggccaggcgcggtggctcacgcctataatcccagcattttgggaggctgaggggagcagatcacctgaggtcaggagtttaagaccagcctggtcaacatggtgaaaccccatttctactaaaaatacaaaaattagtgggccacgatggtgggcacatgttgtcccagctactcaggaggctgaggcaggagaattgcttgcacccaggaggcagaggttgcagtgagccaagatcgcaccactgcactctggcctgggtgacaggacagagcaagactccgtctcaaaataaataaattaattaattaataaaaataaaataaaaaaagtagccaggcatggttgtgtgtgcctgtaaccccagctatttgggaggctgaggcaggtgaattgcttgaatccgggaggcagaggttgcaatgagctgagatcatgccactgcatgctcactgcctgggtgacaaagtgagactctgtctaaaaaaaaaaaaagttatatcttcatcatttgaaggagcaatcaaagagtatgctgaagaagtaggacagtattaaaatattaaaatatttggcaattttttttttctgagatggagttttgctcttgttgcccaggctggagtgcaatgatgcaatcttggctcactgcaacctccgcctcccaagttcaagtgattctcctgcctcagcctcccaagtagctgggattacaggtgcctgccactacacccagctaaattttgtatttttagtagagacagagtttcatcatgttggccaggctggtctcgaactcctgacctcaggtgatccatccgccttggcctcccaaagtgctgagattacaggcatgagtcacctcccccggccatctttctggattttaagatgtttgaggtatgtgtcaagtttttaaaaatctgtaatctgttttgatttctttgtttcttctaaacacatatttacttcagtacctggctttgtattcacaattttgtacattttctttttttttttttgagacagtctcgctctgtcgcccaggctagagtgcagtggtgcaatctcggctcactgcaagctctgcctcccaggttcacgccattctcctgcctcagcctcccgagtagctggaactacaagcacctgccaccacgcc[172 bp omitted]caaaagcttccggacccactaaaaatcctggatatgcccgtaacagaaccccaattttgtttagggtgacaatatacccaataagactgcttttcagtctcccttgcagttatgagtagccacgtgaataagatccggaaatggggtgaagttgaattgcgtgggacccccaggaaggcttcttagagggagcaagctaacttgtctgagaggaggagtgccctttgccccttcgccttgttctccttcatgttgcctgaaataacagatgcgatggctgatgctccagcagccattttagttcatgaagtaacaaactaagggtgattcaggagaaaatacaaggagctgagtccccaggaacagtggggctgccaccccagacctgaatggctgaccgccagcctttttcatatgagagaaaaacaaacccttctatcttgttcaagcctctacatttgggggttttctgttcaatgctcccaaaagtaatcctcaactatacaatgatcccttgagaaagtcacttcccctctctgtgcctcagaatcgcatctgaaaactgcaatgaggctgaatgactaaactggtgcttctaatatttcagccaaccacatgccacatttctgaatgttcctgtgtccatgtgccatcaacactatttatttaatattcttctttaaattgatctgtacttcaaattttttattacatacctttgactaaccccagattgctgttctaacatttctgcaaagatatgtcttcaaatcttgattttaaaaaataacattttttctcaaagaaggcatgggatttgttcttttctttctttctttctttctttctttctttctttctttctttctttctttctttctttctttctttctttctttctttctttctttctttctttctttctttctatctttttttgaaacagtcttgcttgttgcccaagctacatgatctcagctcactgcagtctccatttcccacgttcaagtgatcctcccacctcaggctcccgattagctgggactgcaagcatgaactaccatgcccagtttatttttgattttttgtagagacagtgttttgccatgttgtccaggctggtctcgaactgctgggctcaaatgatcctcttgcctcctaaagtgctgggattgcaggtgtgagtcacagcgcccagcgggatttgtttttttatggctatttcagtaagcaacatgttgacatgagcaatttggataacttctttgaattacgttactgttttatacacacagtatttttggaagttggacactggggaaagtcctggtggatttgtaatttgtgtaactccacaggaagtttcacagggctcttatttcactacgagcccattctaatgttgaccctgtcgcaggccttactttatataaattatgcttcccttaaaagattgggactcactgttctggttcactcactccagccaaaacttgagggtctgaagtttaggctgtacctctggaacttgtctttgttcatgaagacaaaaaatgcttaaatcactttgatctgagtagctccatggggtctgattaactccacatgggtgccaactgaactgtcccacacaaacccccactcccatcacagtgttttattttttatttttgtattttttgtagagacggggttttgccatgttgtccaggctagtctcaaactcctgagctcaactgatccgcccacctcggcttcccaaagcgctgggatttacaggcatgagccactgtgcctggccccatcacagtgttttatattgggtatttcagaacctcttgcccacagagaaatgggcagaggggaccacactatgagaattgattgtatgtgctcagaaatgggatcatgggccgggcgcagtggcttacacctgtaatcccagcactttgggagcccgaggccggtggattgcctgaggacaggagttcaagaccagcctgaccaacatggtgaaacctcgcctctactaaaaacacaaaaattagccaggtgtggtagcagtctcctgtaatcccagctacgtgggaggctgaggcagaagaatcgcttgaacccaggaggaggaggttgcagtgagctgagactgggccattgcactccagcctgggcaacaagagggaaacttttgtcttaaaagaaaaaaaaaatgaaatgggattacggtgccaacatggttgccagacagaccaggcgtctgccagggagtggtttcatatcagatgacctgctatctctgtgaagttaatattgtaccatggccttatccagccctgctgcagttctttactgtgagtaataggaagctgtgaaacagcacttttcataacacaaatggccagttacttggcctgtctctgtcccactgccattgcccaggctctgagctgagtgcgagtctcagctggatgtctgtactgcctcccagacagcctcctgcggtttgtcttacctcctccaatccctccgcctctttaccactcgagtatttttatgacacacaaaacctgctttcttactcctctgcttacagtccttcagtgatgcttcgcactgctcaggagaaagtctgagctcctttgctggaacacaagggcctccagatcagtcccctgcccacttctccaaaccaggcccctgctgcttctccagcacccagtgtctaatctccttggcctggaatacgaggcctccagactgggaccctgctgcttctgcagcacctggtgtctaagtgcctccttcttgatgtctgctcttcagtcacaaggagctgctcatctctccctgaggacacacgtgcacaaacacacacacatgcacacacaagtgcacacacagagaggagcgtgctcttctactccttctccctgcagtccctggaatgcaccatctgtcctaaaccaaaggcccaccccctccctgaagtccaccctggtctcaccaatcacaggtccgatatgcaaaaacacagatataacttagagtgctcactctgtgccgggcacggacttaagtacctcacaggcattagctcttttaatcctcacaacaaccttatgaaataggttctgtgatgagctccattttacagatgaggaaactgaggcttggagatttaaagtaacttgcctggtttcacttagctgccggcccccttttctccccccagaacactgactacatttccttcatagcgtgttagtgcatttaataattttcataaccaccaactctaatgatacatggtgggaaaggtcagtgccctcttggtttgtggtccccacagtcaagctcagggcctggcacccagcaggtgctcagtaatgctgtgactaaagcactggtctgtgtttcttcaaggaagctctttcttcctgcatcaaaatcctcttggctcagaagtggactcatgggaagggctacgaggcttgtgccgcagggtccttcccttgtgtggggccccactagcaatgcacacagatgctcatctagttttgtaaagtaagatattattttttggccaggcacggtggctcatgcctgtaatccgagcctttggcaggccaaagtggtaggatcgtttgagccctggagttcaaggccagcctggacaacatgaggaaaccctgtctctacaaaaaatgtaacaattagttgggcgtggtggtgtgcacctgtagtaccagctatttgggaggctgaggtgggagtcctggaggtggaggctgcagtaagcagagatcatgccactgctctccagcctgggtgacagagccagagtctgtttcaaagacaaaaaaaaaaaaagaaattatttttcttaaagatgccccctatatttgtaatctttagggcccacaaaaccaaggtctgtgtgagaggcttgctgaaaatgcagctttcagctgggcatggtggctcacacttataatcccagcactttgagaggccaaggtaggaggatcacttgatcccaggagtttaagaccagcctgagcaacatagcaagactctgcatctacaaaaaagtaaaaaattagcggggcgtggtggtgcatgtcgctggtcccagctacttgggaggccgaggtgggaggatcacttgagcccgggaggtcgaggctacagtgagccatgattgagccactgcactccagcctgggcaacagaccgagaccctatctcaaaaaaaaaaaaaagagaatgcacatttctagccctacccccaagcacccaaatcttggaagattcttgtcttaccaaagtctgagcaccactatgcgaaatgtttcttccctaccccagtgatttttctatttgctttagggctcaaaagagtcattgcagtggtggggtcagctattaacatctctcttttcctggaaaccagttgatgcctataagaggggtttcctcagctctctgaataacttcaatttgttctttttgggccaagccctgtgctgcctggtcctgctgatgagagttcggctagagggaggggtggggaggggcctgagctgggggaccagcaggggggcagcctgcagccctgaaccctaatcctcgtcactgtcccttctctgcctcataaaggtgttcttgctctttctcctttctagccaagtctcctccctccacatatgtgttctcatctagatcagtttcgattcccgctggtggaaagcagcctcaggcagggccactgcgcaggaagggcgggcctgggtgcaggcggggctccgggagtcacccccagacgcgcggctccccttccttgtcctccgcatgacgcccgtgccggagcccacgtgagcctttgccaaggagagattcagagatatgagcagaaaaactggaagatggacttcttcaataaggcagcgggacggtttggctgatggaagatgtttcccggaagcctgttcacgctccaccctgaaagtcccagggccgtgagagtcagccgggccgccgaggcggtgccctccaggctgcaggatgatccagggactgttttcctcagcactgtgtaggtttcagcttatgagttctgtccatgttttgtgagatttatagctaagtatttaccttttcgaatgattataaacaacatagtagttttaattttagtgtctacttgttttttgttactatatagaaatacaatcgattttcatatatttatgttgcatcctctgtgcttctaaactcactagttttggaagctgttttttgtttttagattccttaaaattttatatatgggcaatcatgtcatttaataatcaacctgtatgcctaaaataatcaacctgtatgcctaaaataatcaacctgtatgccttttattgtaagaaaatccctaaatactgggattacaggtggtgagccaccgtgtccaacctgaaactttttttttggtgatttcaaatgaacttgacttttactgtaattatacctaaagtatttgtaaacaattgtttagaacttctatttgtcatggacttttgagtttattctttggatcatataaaaagactttttttttttgtttttaaagttataaatctctgtatgcactttgcttttcttaattaaacataatccaaagtaagctgtgactcatttatttatttatttatttgagacagggtgtcgctttgtcacccaggctatggctccatcttggctcactgcagcctcaacctcccaggctcaagcaatcttcccacccacctaggcctcccgagtagctgggactacaggcatgcaccagcatgcctagctaatttttgtattttttgtagagacagggtttctccatgttgcccaggctggtctcaagctcctggactcaatcagtccttctgcatcggcctctcacagtgttgggattacaggcgtgactttgccaccatccccggtttgttttttttcaacaggcagagtttaactatcacggaagcctcccgcctcagcctcccaaagtgctgggaatacaggtggaagccactgcacccatccagctatgattcttcggtagtgtacaagattgtacactaccaatgtatctgattttcaatttttcttgaaatgtgatgcaagtggtgtcagcctgctgataagttaacattgttcaggatgaatcttctacagaaataattgctttttttccccagtatttagtactgaaagatattaatggtaatatatttctggtttaatataaattaagcatgttttctagttgtgcgtgaatgctggctggcaacttagtaagttttgacagttgtttaaatatgtaatgttaagcttaggttttaaaaaagtaaaacttataaaggaaaataaaaagaatctcaggatccccaaactccttatgccaaagagaaagttaagcctggaggttgtgccacacaacactgccatgcttttgccaagtgcaaagctgctacttcacaagcttgtgtgaaagcatgaagcattagccagacccccacaggatgcaaaaggcctcaggcagctccagatgtttgccccacaaatcagtcacacttaaatattttgctgcctcaaaaactttcaagatgtcaagatgtatatccacccgtaaaatgagggcatgttgattgtaactttaggtctgcaatctaaatgtagctcctgaaaccaatgttgttcctttctacacggataatgttgattccaagcttatctttccaggtgcagaacaaagcgaagatgagattaatcatgcttccacctacccggagacacctgcacaattaattcttcctttactccctttttttccttcagaagttcaccttatcttatgtaaaatgcagatctactgggcactaactaaagtctcacaagaatataaccattccctgtctcactacttacctgcccctcatcctacatgccttccccacccctcttttttttttttgagatagagtttcgctcttgttggccaggctggagtgcaatggcgtgatcttgccttaccacaacttccgcctcccaggttcaagcgattctcctgcctcagcctcccgagtagctgggattataggcatgtaccaccacgcccatctaattttgtatttttagtagagatggggtttcttcatgttggtcaggctggtctccaactcccgacctcaggtgatctgcctgcctcggcctcccaaaatgctgggattacaggcttgagccaccgtgcctggccatgccttcccctgtttaaggatatgtataaatactaaatctccttaaaacctcttcagagaatccatgccacagactctttctgtgccttgtgtttttcctgggcacttcctcaagcttggactcaataaactttggctgatggagacttacctcagcctgtcattttttttgtttaacaaactgataaactgctgtttattatttacttttaaaaaaagaaaataaatatgaatgtgtttggcacattcaaaaaaatttaagaactgctttcaaaagacgctgttgaaaaaatgaaaagatcgtcacaggctgagagaaaatatttgaaaatcagatttctgataaagtgcttgcatctgtcaagtcttgttaaacaccaacaacaacaaaaaaaagtactctcatccaaaatatgtaaattactctcaaaattaaataatgagaaaaccatctaagtttataaatgggcaacatgttggaacagacaatgcaaaaaaagaagagacacaggcataaataaccaactgaatagatgttcaacatcatcactctttaaggaaatgcaaattaaaaccattaatgagacaccactccacaattattaaaatgaaaacatttcactcaggcttgagaggctgataatgaggttctgcctgtcttgtcacccagagttatctgatacaccttaggaatgcaccctgagactgggtaatttacaaagaaaagagatttattttggttcacagttctagaggctgggaagtccaagattgagcagctcatctggtcagcttctggtgagggcctttgacctgtgtcctaacatggcagagaagcagaagggcaagcaagcatgtgccagagagagaggacaaaataggctgacctgctttataacaacctactctcaggagagctaatccattctctcgataacccacccagaggaagtcattcatccatcctaataacccagtcacctcttaaagaccctgcctccaaacaccatcatgttggcaagtaaatttcaacatgagttttggttggcacaaaccacattcaaatcatagcacctgtcaagcagagagaccagcctgtcctgaacaccctgaagtaagtgcctagggtaaggccctgtggggggatggggaacagaataaacctggcagtggtagattctcagtctggttcatagagaccatcatacctacattaaaaaaaaattttttttttgagacgaagtcttgctcttgttccccatgctggagtgcaatggcatgatctcggctcactgcaacctctgcctcccgggttcaaacgattctcttgcctcagcctcccgggtagctgggattacaggcacctactaccatgcctggctaatttttgtacttttagtagagactgggtttcaccatgttggccaggctggtctcaaactcctgacctcaggtgatccgcccacctcagcctcccaaagtgctggaattacgggcatgagccaccatgcccggccacatttttaaaaattttaattgcaggcaggtgcagtggttcatgcctgtaaatcccagcattttgggaggccaggggcaatctattaacacagccaagcggggacagcagattgctagaaggaatgggacacagtcacacaggccaagctagcatgggctatcgatggggtggggaggaggaaggcagaggagatttaaattatgagatgtacctcttagggaagatttttggaaggggtgattagagcaaatagggaatgatttggaggattctagtgagaagaaatatggaagcctaaagatgaacttccttgttcacaacttgcctgccttgataaatctgtgttgttcattactatgtccctagcacctagcgcagagccttaagcatagtggaacttagtaaatatttgttgaatgacttaaaaaacatgatatgctatattaatatctcacttaaagcattgctatccttctaaatatttctacttagtttaaaatacataattattaaattaactttgggccaggtgtggtggctcacacctgtaatcccagcactttgggaggctgagacgggtggatcatttgaggtcagaagttcgagaccagcctaaaaatacaaaaattagccaggtgtggtaacgtgcacctgtaatcccagctactagggaggccgagacaggaaaatggcttgaacctgggaggcagaggctgcagtgagctgagattgcacctctgcactccaacctgggcgacagagcaagacttgagactctgtctcagaaaaaaagctgggccaggtgcggtggctcacacctgtaatcccagcactttgggaggccaaggcaggcggatcacctgaggtcaggagtttgagaccagcctggccaacatggtgaaaccctgtctctactaaaaatgcaaaaattagccgggtgtggcagtgggcgcctgtgattccagctactcgggaggctgaggcaggagaatctcttgaacccgggaggtggaggtgagccaagatcacgccactgcactccagcctgggcaacagagactccatctcaaaaaaaaaaaggccggacgtggtggctcatgcctgtaatcccagcactttctgaggccgaggcaggcagatcacctgagatcaggagttcaagaccagcttggccaacatggcaaaaccccatctctactaaaaatacgaaaattagccgggtgtggtggtgcatgcctataatctcagctacttggaaggctgagggaggagaatcgcctgaacccaggaggcagaggttgcagtgagccgagattgcaccactgcgttccagcatgggcaacagagtgagactccataaaaaaaaaaaagataataaataaaaataaatcaataaactttgaaattttacaaaagatggttgtactaaaattaatttatgatctttaacttactttttccttcatttgtgctcttatctaatatttatgtatatccattagtttttattatctgagtaacgcatgggcatgcttgtaaaagttcaaaatttaaaaagtctagaaggttaaagttgcataaatgaatatatcacatgatttttacatagtcataattgcatatagttttatatttctatattctcacttattttgtaaatacttttccatctctctaatagtcactaatttaaatgactgcaaaaattccaatcatgttatgtcatacttaatttagctattcccctacaattgtacatatttcaatttttaaacattttttaaagcacgtagtgttgcttacacagaatatatatatatatatatatctgttgatataaacagaatatatgtacttgagatatcaagggaaaaaaaaacaaagtgtcttttttttttttttttgagacagtgtcttactctgtcgcccaggctggagtgcaatggcacgatcttggctcactgcaacctccacatcctgggctcaaatgatcctcctgccaaagcctcctgagtacctgggactacaggcatgtgccaccatgcctggataattattgtatcttttatagagataggatttcatcatgttgcccaggctggtctcaagttcctggcctcaagtgatctgcccgcctcggtctcccaaaatgctaggattggaggcatgagccaccacacccagcccaaagtgtctttttcctattctcttacacagtcattcagcacaacacttttgataccagatatgtgtgagtttttttcctcacacaccaaacaagcaattctgtaacagacaccagctggatgtcttataattcaattcaattctgacacctggtgatcccacaggttacggctcaatgccataaaaccatcccccattgctgcgaggcacgaactacaacatgttactacactgaatactgtaggcaacagtaacacaatggtgagcatttgtgtatcaaaacgtatctaaacacagaaaagatatggttaaaatacagtttataatctaatgggaccactttcatatatgtggtccatcactgaccaaaatgttgttgtgtggtgcgtgactatatagatacatggtcatccctcgatactgaaggggaattagttccaggatccccttgaataccaacatctgaggatgctcaggtcctgcagttggccctgctgaacacccggatgtgaaaagtaagcctctgtaactgtgggttctgcatgctgagaatactgtattatccccatttggttgaatccacagacgtagatctcgtggatatggagggctgactgtacatatttatctatctatattttttcttttgaattattttcttatactatatttaattctgctgatttctttgcagaggtaaacagaaatgataatttttttcttgctttacaaaagagcaagaaaataaattataaatgtgccattccatggaatttttttgttggacagaactagattgtggtctaaaaaaatcttgagaatatatatatgtttgtgtgtgt[131 bp omitted]aaccccgtctctacaaaaaatacaaaaaaaatttagctgggcatagtggtgcaagcctgtagtcccagctactcaaaaggctgaggtgggaggatcgcttgagcccagaggtgagggatggcagggtgggggtggaggttggggtggggtggaggttgcagtgagtcgagattgcgtcctgggtgacagagtgagactctgtctcagagaaaaaaaaaataagtcagcaaaatttttaaagtctctaaagtgattaaaaattaaatacgtttttgcctttcagagtttacaatttggtaggctgtagggaccagccccacagggtcggtgggtctctccccatctgcggagatgagagagtgtagaaataaagacagaagacagagataaaagaaaagacagctgggcccgggggaccactaccaccaagatgcggagaccggtagtggccccgaatgccaggctgcactgatatttattggatacaagacaaaggggcaggataaggagagtgagccatctccaatgataggtaagcccatgtgggtcacatgtccactggacagggggcccttccctgcctggcagccgaggcagagagagagagggagagagagaggcagcttacaccattatttctgcatatcagagacttttagtactttcactaattttgctactgttatctaaaaggcagagccaggtgtacaggatggaacgtgaaggcagactaggagcgtgaccactgaagcacagcatcacagggagatggttaggcctcccgataactgcgggtgagcctgactaatgtcaggccctccacaagaggtggaggagtagagtcttctctaaactcccccggggaaagggagactccctttcctggtctgctaagtagcgggtgtttttccttgacacttagactaccgctagaccacggtccgcctggcaacgggcgtcttcccagatgctggcattaccgctagaccaaggagccctctggtggccctgtctgggcataacagaaggctcgcactcttgtcttctggtcactcctcactatgtcccctcagctcctatctctgtatggcctggtttttcctaggctatgattatagagtgaggattattataatattggaataaagaataagtactactaatgattaattatattcatatataatcatatctaagatctatatccggtataactattcttgttttatattttattatactggaacagctcgtgtccttggtctcttgcctcggcacctgggtggcttgccacccacagtaggtaggctaatcaatttgcccttgggaagatgatgtaagtcagcaaaagaattcctaatttaaaatgtagctgttaagggtgatatgtgagcatgtttaagcaatgtgacaaatgctttacctgcatcattttatttaatcctcagaagtgtcctatgaaatagctccattttgcagatgaggtttatatttttcagaaaggtcagtcacttgcccaacattgctagtcagtgttacacagctagcaaagtgttggagataaactgtagactccagagcccatgctcttaatcactccatagacattcaggccatttggaggtaggcttctcaatatcaattatgtcttaattgagggtatttgttttccaatttatctgaaaggagctcaagaaaattaaaaagaagactggatgcaacctcattaacagatgaagctcttgtctggaaatatactttcaacactgacagttataatcaaatgccttttaataagtaattgtgctgagtgatgtaccttcaagcgaaatcaagcaaacaggcagaatccatgtcctctagagatggacccttgtgactgactatgccaaagacatggatgtttgaacaatgaaccaataacgagtgtgttgaaaggcaagataaaatacagcatttacctggtatcaaagcattggacttttccactccaccagagtgggcctggcaggaaaaggaggaaggcatcctggaaggaatgggacacaaaagtgaagaaaacacagatgatggatgctgctttgggtttaacttgaaagaccaaagataggtgggtctgaagcatgggactgatgccaagccaagtcttatttggtttcctgcccaggactcaccaatcagagattggtgagagactctgtctaactcaccaatcagagattggtgagagactctgtctaactcaccaatcagagatggggcccctgttcccacccaatgtcagtcatttaacacacactttatcttctacccagcaggcctgcccatttgccctgggtgttctgctgttctggaactcagagagaggctgtgtcactaggcataaagatggatcctcttatctcctggcgaaagcactttgccctgacctcctcccctgcacagttgaggaggcatgaagcctgtattgtgagggtagagctccttcctggcattctagaggaaaattccatcagtgccttctagataccaatctgtcctcttggccttatccaatctatttaatacattgtattcaatctgtaatatcccaacagtaaattcactgccaacaactctgttctttggcttatgatttgctgcagtatgtgtcatcatgaagctctgtcctcaagctcagagaggtgtacagaagccacttcccttataatttattttatttgatgtgtgggtgggaagggggagactaaacctccttattcgcatcctccctggaatatttcttcattatctgccaatgaacaaggagtgtgtctttcctatctccctcttccaacatttatatatcactgaccacacgccaggcacaattctaagtgttttcctaatatatatatatatatatatatatatatatatatatatatatatacacgtatacatgtatacgtgtatatatgtatacatgtatatacatatacacgtatatgtatatgtatatacataaaaatatatgtatatacataaaatatatatatatacatatatatgtatttttttttgagacaagttcttgctctgtcacccagtctggagtgtagtggcacaatcacagctcactgcagctttgacctcctaggctcaagtgatcgcccacctcagcctcccaggtagctgggactataggtgcatgccattatgcccggctaatgaatctttttttttttttttttgagatggagtatttctgtgttgcccaggctggagtgcagtggcatgatctcagctcactgcaacctccacctcccaggttgaagtgattctcgtgcctcagcctcccaagtagctgggattacaggtgcccaccaccatgcctggctaatttttgtatttttagtagagatagggtttcaccatgttggtcagggtggtctcgaactcctgacctcagggatccacccacctcatcctcccaagtgctgggattacaggcgtgagccactgtgcccagcctttcctattatattaactaatttaattttcataacaatctcatgaggtatgtcctattgttattcccatttggcagatgaggcaaagagaagttaaataatctgtccagtgatgcacagctagtaattggcacaactgatgttcagatctagcaggcagactccagcatccttagtctttgttgttgttgttgtttaagagacggggtcttactctgtggcccagactggagtgcagtggtacaatcacagctcactgcagcctcaacctcctaggctcaagcaatcttcccacgtagctgggactacaggtgtgcaccaccacgtccaattaattctttaattttttttgttttcttttttttggagacagagtctcgcttaatcccccaggctggagtgcagtgatgcgatctcggctcactgaaacctccgcctcccgcgttcaagagattctcatgcttcagcctcacaaatagctgggattacaggcgcctgccaccacacccggctaagttttgtatttttagtgaagacaggattttgccatgttggccaggctggtctcaaactcctggcctcaggtgatctgcccaccttggcctcccaaagtgttgggattacaggcgtgagccacggcggcttaattctttaaaattttttgtagagacagggtctccttgtgttattcaggcaggtctcgaactcctgggctcaagcaatcctctcatccccagccaagcttccctgctttaaccagcgacctgtgctgtctccaggagaacatcagagtgacacctagtggacgtttgttaacatcataaggagggaataaagttcaaggcaagtcagggagccagactggcagaagtatagatgatcaggagatggctgcggactgtagaaagaaacttacattgcaggggaggcaaaccctggcataccagactccctctccccaactttagcaagtgctggcctcagtttgtaccaaaccatatccattgctcactgaaagtgcttgatattgcctcttttctgcagctcttgagttaggttttttttttttagatggagtctcactctgtcacccaggctcgagtgcagtggtgcgatctcagctcactacaacctccacctcctgggttcaagcgattctcctgcctcagcctcccgaatagctgggattacaggcatgcaccaccacgcccagctaacttttgtatttttagtagagacagggtttcaccatgttggccaggctggtctcaaactcctgagctcaagtgatccacccgcctcggcctcccaaggtgctaggattacaggtgtgagctattgtgcccggcctagtcagatttttatttttttttatttagagacagactctggctctgtcacccagacttgagtgcaatggtgccatcatagctcactgcagcctccaactcctggtctccagtgatcctcccacctcagcctcccaactgggactacaggtgcatgccaccacgcccagctaatttgtttattttttgtagagatggggtttcaatgtttctcaggctggtcttgcactcctggcctcaagagatcctcccaccgcagctaccccaagctttgggattataggtgttgaaccaccatacctggctggatatggatttttaagtaagttttatttacaaaggagttctttgcaatattgtatctgtgatgtccctctaaataaatgctttttccaagcccctgcctaccagacattacccagtacacatctacaaccccacgaagaccttgttactgctcaccctcctggagaagccccaatgagtcaacattgtcattaactggcaacgctgattgagagctcttagggatctagattcttcacaaagctgcatggtgcaagcagtgccctaaagaatttgcccctctgtaaaaggcttttgtcctctgtgctctgatatttgtgtaacttgttttttgtttgtttgttttttaggaaaaagatttacaattcattacattattcacataaaatacattattttatgagctcctccaaacaatttcataagagatcacagccttcacttggtagagaggaaactgaggcacaactaggtgacatgagttgcctagagtcatgcactaggaatggcagagcaaagctcagcctcagccatgccgtctgtgccaggtcattgcgtctctgtgggccttgcttttttttttttatctacagagtaacgggattggaataggagctctgtcagggttcttccaactcaaacattttgtaacactaaaattctgagggctacttttccctgaaagatcaggtaaccaagcctcctgaatttcacatttccactcattgaggtgtggggggaggagggagatgaaagcaccttatttacatctacccaggaacgcgacttcattatctctcagtgaacaaggagtatgtctttcccatctccctctttttcctaacacggacagggatagagttgtttttgaaagggctttctcccctgtgctccttatggacatcaaataactaagatggtgaaattctg[140 bp omitted]ggtgaaaccccgtctccactaaaaatacaaaaaaaaaaaaaaaaaaattagccgggcgtggtggcggacgcctgtagtcccagctactcgggaggctgagg[139 bp omitted]tttagtgactttttaatataataatgatagctgagatcagtagagcacacgctctgagtctggcactgtaccaaatgcttgacaagtattatagtatttattactcacaaccatctcaagaggaaggtattatcatcattatttccatgctacagaagaaggaacagtggctgagggaagtaaaaataaaagcacttagtcgagatcacagagctattatgtggagcctagattcaaacccaggaaatttgccagcaactcttaactgctgcaagagaccacatgacttctcctaggagaaagggaagttggtattacgcacatttcattccctttaagtgtttattgtgtaatatttaagatagaaaaaatgtacattatgcacagatagtgcttcctcattaatttatgtattttatatttcccactgtgtgccaagtattagggatgtgatatatattcgcacgcgtatgtatatatatatatttgccattgtgtaccaaacattaagcatgtaacaacaaattcctccagatggagagggtcacgagaaaattaaggcaatgttagaaaaatcatctagagtttattatcgagtgccacctccgtgtctagcattacgctgggtaagcctgagtaaagaagagtgtccgaaaaccctgccataaaataaactacatagacagaaaaaaagtcacttagtttggttataaagaaaggagtcttgttcacacagcgtaaaaacgaatcttataatcgtattttataagcatcagaggcaaaagcaactagggtgacgggctttggggagtggaaagcgccggatcctgggagccagtcgccctactcgatcaagcattttctgacggccctatccaataacgtggggacgcagctgaaaaccatgcaagctgatcgctgccctcccggagtttatggtctggtgagaagatccctgctctgagtcactgccaagctctagctatgtgactttgaacagggaatttctgtccctatctataaaataaacggggttaaaccagggaatccgccattcaaattcctggcccaagtgtctccggggtcgcggtgcccaaaggagggtgggcgaggctccctgggcctgcgctgcggcggcctgacagcgggagcgctgttccggcgcagagcgcgttcgcgttccgaaagcgcgtgtccctcgccgcgtgccgtcgtccccgccgccgccgccgccgccgccgccgccgccgccgccgccgccgccgccacagcccgctgggccggaggaggcggagctggcgctgtcccggctctcttgcggggaagcaactgagggggcggcgcggcgggccccggcggccgaagaggctggcaggtggcgccgtggggtgggtgctcctggtgagaggagtccactccgtgcgtgcgggcggaggccggcccccgagagccgccgacatgaagaaagacgtgcggatcctgctggtgggagaacgtgagtccgcaccctctggccggcccctgagtccctgccctccctgcccctgcagcccctgtcgcccctgtcgcccctgcagccccaacctttgcagccccggcccttctcgcgcctcacagctccgctcgcctttctccgcgttcctaggccttccagccccttcactcttctcttttggctggccgccggcggccctcaccctgtcacctcacctgggccctccagagatctcctttccctgttccccagccgtcctcccaagccatgtccctattagccctaaccgcccgacctcatccctccgaagcttctctcctccttttcctcttcgaaccctgtccttctgggcctcacagtttcccaggccgcctcctttcagaccttcttgtcttctggagattcccttatcactgccaggcaggtgctggaataagcagactgaccaatagggattgcgtgaaccggctcccggggaagctgggggaggggtgcagaactattcgacttgtgggcaaggtcaggtttctgcatttttttggcactcgcagtcttcactctctctatgtattgacattaagatatgagtagtggaaagggccggatcctttttagcagtacttgtactttgcattggactaactcctcgtactcgagatatttcatcaaaaatttttactcaacttcgagttatgcaagcgctcaatgaattagaattatctggggagggtccaattgttgttaccctaaagcgtaatctttgccctctttttaagcattatttattccatagttacttcgtagttaacttattaataaccacaggcacacagacatttgatatctccccccacccagaaatttcatacatttcaccttttgaaaatataataaaggagagttccctctgttcactgacatgaggacgcaacagcggggacttcttgatttcactctgcaagttatgtaactcagttgctaggactaaaataagaaagtgggccagggataactggattgtttgttttaaagagttaatacattcgttaatagtctgccattgctgtttcgaagcattctgttttaaaccattatttcattcttggtaacccctcagggtcaccgtgatggaatcccaaggaagaaagttaacacgtttttaccctcttctgtagtgttctttgagttcattgaaatttcatccacctgctgtttggagaaatcttcctttagaattagaatttaggagtaagcttagccagccatagtttactttttgatttgcagttgtaaatttttatttttatttataactatatcttaatctgtatttttcatggacttccttgacaaggttcaggaaggtgttatttaacatataattcatgcttatgcttttggagcaaggtagggaaagtgagtagacgacttgcttaaaaaactgatccttaaatatatgatgaaatagtttgttgttgttgttgttttgagacagagtctcgctctgtcaccgaggctggagtgcagtgcctgggattacaggcactgtggctcatgcctgtaatcccagcactttgggaggccaaggcaggcagatcacttgaggtcaggagttcgagacgagcctggccaacatggtgaaaccccgtctctactaaaaatacgaaaattagccgggtgtggtggcacacacctgtagtcccagctactctggaggctgaagcaggagaatcacttgaaccctggaggaggaggttgcagtgagctgagacatgccagcctgggcagcagagcaagactctgtctgaaaaaaaacctttaataatgctcccacacagctgggtgaggtggcttatacctgtattccaagcactctgggaggctgaggcaggaggatcacttgaggccaaggagtttgagaccaacctgggcaatgtagtgagatcctgtctctacaaaaaatttaaatattaatggctgggcacagtggctcactcctgtaatcccagcactttgggaggctgaggcaggaggattgcttgaacgcaggagtttgagaccagcctgggcaacatagtgagaccccgcctcaaaaaaaaaaaaccacaacactattagctaggcatggtggtgtgcacctgtagtcctagctactggggaggctgagatgagagaattgcttgaacccagaaaatcgaggttgcagtgagccatgatcacaccactgcacttcagcccaggtgacagagcaagactgtctcttaaagaaaaaattaatttttaatggctgggcacagtagctcatgcctgtaaccccaacactttgggaggccaaagtgggcagatcacctgaggtcaggagtttgagaccaggaaactgaccaacatgacgaaacccagtctctactaacaatacaataattagtcagctgtggcagcacgcacctgtaatcccagctactcaggaggctaaggcaggagaatggctttcacccaggagatggaggtcgcagtgagctgagatcacaccactgcattccaacctgggggacagagtgagactctgtctcaaaaaatatatatatatattgataatagtaaacaggatagttttcattttaatggagtcttctttttaaattaaattgagatatatttgttttctactagttaagttccttaagaaaatggaactgttatcttcttttaaaatgaatctggcagatctttaactggtttgtctaactctgattatcatggcaacctctgccaaactacttcaaaattccactggctttggccttgacttttgcaatatctcccttaaccagtctttctgctcctgctttcctccattttccgtggagcaggcagattcatttttatttttttatttttaatttttttaccctgaagtatagattcaagctgtcctgaatatatacagattcatatttagaaaatatctcagattctgctatgcaccttaaaaatcatctaatgagccaggtgtggtggctcatgcctattatctcagcactttgggaggccgaggcaggtggatcacttgaggtcaggagttcgagaccagcctgggcaacatgacgaaccctcatctctacaaaaaatacaaaaaattagctgggtgaagtggcgtgcacctgcagttccagctacttgagaggctgaggtgggagaatcacctgagcccaggagttcggggctgctgtgggtcatgactgcacccctgcactccagcctggttgacagggtgagaatctgtctcagaaaatagatgtatatcatccagtgatttctactttcacttagaataaagtccaaactttttaatgcagtcctgtaaggccctccacaatctagcccttacttcccttttatgctactctctccttcattgctctctctataagaaggctctgacctgggcattatccccataaccatgtatatttgtacattttttgtcctgtctcttgggctagaaaagaatcatcatgaaggcaggggatttgtcttccttcttgctgtatccccagtggctagaacagacctggcacaaaagaggcactcaggtatttcttaaaagaatgaatgagttcaagctagttcagtttgtttagactttccttgttttccaaaccactcctctttgtcataaaaatttgatcatttttctgtat[133 bp omitted]gtctcccgagtagctgggactacaggtgcccaccaccacgcccggctaatttttttttttttttttttgtatttttagtagagatggggttt[131 bp omitted]ctctgtcgcccaggctggagtacagtggtgccatcttggctcactgtaacctcagcctcccaagtagctgggatgacaggcatgcaccaccatgtctggctaatttttgtaaattttttttttttttttttttttttttagtagagagggtttcactgtgttggccaggctggtctggaactgctgacctcaagtgatccacccacctcggcctcccaaatactgggattataggtgtgaaccaccatgcctggcctgctctttttttatttttttgaggcagagtctcaccctgtcacccaggctgcagtgcagtggcacaatctcggctcgttacagcatcagcctctcaggttcaagcgattctcctgcctcagcctcccaagtaactgggattacaggcgcataccaccacgcctggctaatttttgtatttttagtagagacagggtttcaccatgttggccaggctggttttgaactcctgacctcaaatgatccacccaccttggcctcctgaagtgctgggatcacagtcatgcaccactatgcctggcctaagatcattttaaaaccatattgctaatcccagcacttgagaggttaaggcgggagacttgcttgaccccaggagtttgagattggcctgggcaacatagtgagaccctgcctctacttttttttaactattaaaaaaaaaagccatattgctttccattctggtctttgttggaatgatatttaaagattaaactggccgggcgcggtggctcacacctgtaatcccacactttgggaggccaaggtgggtggctcaaaggtcaagagttcgacaccagcctgactgacatggtgaaaccctgtccctactaaacatacaaaatttagctgggcatggtggcgtgtgactgtaatcccagctactcaggaggctgaggcaggagaatcacttgaacccaggaggcggagggtgcagtgagcggagattgcgcactgcactccagcctgggcgatagagtgagactccatttcaaaaaaaaaaaaaaagattaaactgctccagtttcaattacactgtgtttactacctgggtaatattctatggccagggatgttcaaacacccattgaggtgaactgcatcttttctgggcccact[136 bp omitted]cggtgaaacctcgtctctactaaaaatacaaaaaattagccaggcgtggtggcaggtgcctgtagtcccagttactcgggaggccgagccagaagaatggcatgaatccgggaggcggagtttgcagtgagccgaaatcatgccactgcaccccagcctgggtgacagagtgagactcccatctcaaaaaacaaaaaagaaaaagaaaattccttaataagtatttagtgcttagataaaagaagttaagctgtctttaaatgcagagaaagtcaaagttcaaacatccctggccatagagtccattctgcataaagagtctattctgttcgtacagagtcctttctataacatcctcacatatgtactgaaacctattctctgctgtcctttattgctgcaccagttggttactagtgttgatctcgtttgaaggagaaggatagctgagcgatagcttttgttctgcaggccacatcatctgcatgtgggcaatgaaattgtcctttggaacagtgtttagctatttcgccaaatgctaaagttttccagttaaaaatataactccatagttaccttcctccccctagtgtattctaatttcaataacttaggaagagccaacaacgcttcttactaaagaaacataaaaatgaggagtagttctctttgccacttgaagcagggggtgtttgttatcaagaaaaatagccagtatggctggtagattggtaattggaaccagagaatgttatttctgcttcatgaatattaggaatttgctgtcatttggaactagatgttcaaaagatgtgatgaaaagacacatttgtagcctggataaatctggataatttgttctatagtgatgaattatgttttccatggatgacctgcttagaagcatggagtctcagaactgtggcatattctattgaactggatcagaaggccttctgtccttgtggataattgtggtcttgcttttagtttttatagattacttcaatatttctcaggcaaaatagaagaaatagagaccattagtcggttggctaatgaaggataagttttttgtcctccatattaataacatactaaatgtttgtatcaaatgtatttatattacattttatacattttattataaattttatttgtaattatttgttataagttttattataaaatacaatgttttatatgcatttgtcctataacttttatagtaaatatgaagtttaattagtgtaatttaagaagagcttgggatttttgtttcctcataaacaatctttattttctgaagcagttaaaaatatatagtgtttatatcatatttgccattattaagatacctttttgattgtaagcatatttaaatagtttttagaatttaatattctaaaatgtttcattatctttagcatagtctgggtgtggtggctcatgcctgtaatctcagcactttgggaggccgaggcgggtgaatcacttgagcccagcagttctatatatatatatatatatatatatatatatatatatatatatatgtgtgtgtgtgtgtgtgtgtgtgtgtatacacacatgcatacatacatacactcacacacatatatatacacacatacacatatatatacacatatatatacacacacacacacacatatatatatagagagaagagagtctcactctgttgcccaggctggagtgcagtggcatgatctcggctcactgtaacctccgcctcctgagttcaagtgattctcttgcctcagcctccatagtagctgggattataggcatgtgccatcatgcctggctaattctttgtatttttttagtagagatgggttttgccatgttggccaagctggtcttgaattcctggcctcaattgatccacgtgcctcagcctcccaaagtgctggtattacaggtgtgagccactgcccctggccaaaatattaattttttaaaaatagcttaaaagtggcttttacacttgctgctttattattcctttgatagtctcacatagggttaggtagggaggccctaaggagaacaaaaagccctagtttagatttactgaaggattttttgactaagtcacatttgtctgatcctttattaaagtagctgttatttcactgctcttccaaaaggaaacacaaaaatgatactgatgaagatgtgctattttttttccataaattcactgtaatctgtccctttccaattttgaacttttgctgctaatgaactttttttttttttcatgtgtaagatgcaagaagacctcttttctaaatggtccatatttattagtactctagtcagagaaatccaaagtctaccatattggaggttttctggaattccaggctgtctgttagactgtagtctttaaagccttgccttatcatactgggccaggtttgtgtgggagataggcctacagctagaccagcaaaggtgctgagagaggaaccctgtcctcctacctggtactttgtgagtgagagatactgatacagacagtggaaagaagagctggatatctcattctcatcaggaagattatacagttctatgatttgggatatgtcataggcatcagagtacaaagcaggaactgaggccaccagcctctcccactgagtatcttgcatttggaagtcacttgtgggactctcagtgaaggtagagttccatgcccaattggaagggtctaagagctgaggtggaagggagctgtagaaatctgaaaccacgggagaaaaagcataagcactgggggatgttctgggggaggtgggcacattcttcttggatggaaggtatctggtttggttgctttgctgattgctgctgctgctgctgctgctgcttcaatttgaatcgccggttcctaaaccaaacctgggagtgggggaagaggggagattgtggtctgttcttggagaaggcattccaggcttctcctgagtgaaaacagccaggttatcatctcacatcctctccaatttaccatgacactgggttctttactgttgactctggtaggttgagtttcaaagctagtttctcctgaagatttctgtctgggaacatggtctggctaaacagagcttctagttctttatactgttggcgggtgaatgaagtacattcttgatgccttctccatattgctgtagtcccagatacttgggaggctaaggtgggaggatcacttgaacctgggaggttgaggctgcagtgagccaagactgcaccactgcactccagtttggatgacagagtgaaactgggactagctggatcctgtggtggtatcaccttcatgttggaatcattcctgttgatgaaagagtctagctagggattctctggggccattctgttcatcatggtttctgaaatctgtcatgaatccccttagaccattttcagtcctgcgcggtgtgtctctctctcaatgaactttttaaaaaaaggaaatcatggcccggagcagtggctcacgcctgtaattccagcactttgggaggccgaggtgggcagatcacgaggtcaggagttcaagaccagcctggccaacatagtgaaaccccatacctactaaaaatacaaaaaattagccgggcatggtggtgggcgcctgtaatcccagctacattggaggctgaggcaggaga[132 bp omitted]tggaagagattcacgttctttgatttttagaagatcttttattgtacaattacttcacaaactagatggtattttttataatgtagtgagtgctaaattacctcaaattcttttccagataaggcaggatatgaataaattttttaaaatcacactttaaaagatagtgactgatacaaataacttaaacagaattgcccccactctttgttaccactgtgttgtgtgtctgtatgttcaagcgtgagtaaagctacttgattattgttgtctttacgacaccttctctcctgccagagtgttttctttcctatctctgaggcctgccctgctggaatagacctggtgtactttggcgggagcctgctgctacacaggcagccagaactgaccttcagactaatgagcagagctgtgaagaaatctgaagttcctcataatgttggttgtctgttctgaaaatatcattgcagacatagggagtccatgggaaaagcagaaggagactgtgactgggaaaaagtttgttctaatgagttttaagaagagagatgaaggtcttttctctcttggaccttcagacacccacttgggtctctagcaagtaaatttttcatttgtttcctcttataaagccttttaaaataaacttccacttctgctctgaaaaaaaaaagagagagagagatgaggaagaatggatgagttttaagggccatggtgagggagggaacttcaaggggaacaaaacatctcttgaaagcctgaattttgctaagagatcctatgtgattgggattaaggaacaagtgctttcttggaaaccagtagcctttcagtgttggggattggcttaattttgatcacattatttatctttttttttttttctttttgagacagggcctcactcggttgtccaggctggaatgtagtggcgtgatcatggctcactgtagcttcgacttcctgggctcaggtgattctcccatctcaaccttccgaatacctgcatataggcatgcatcgccatgcctggctaatttttaaattttttgtagagatagagtttcaccatgttgtccaggctggtctagaactcctgggctcaagtgatgtgcctgcctcagcctcccaaagtgctgagattacaggcgtgagccgcctcacttggcctgtttaacattttttgaattgtggactaaaaggtaggtttttttttctttctgaaactgatgagggccttagagtggtggaacaagagcaaaattttaaaaagataattctgaaaaggggattatgagaagaatcagggtcttaagcatattaaggtaggcacatttcttatggacctagagtgggactgagttattgaatgtcagcttcatttttgccatccttagtatagtagatgaaggatgagaatatggagatatttgaaatatccaggtagctgggctctgtggctcatgcctataatgccagcactttgggaggccaatgcaggaggatagcttgaggctagaagtttgagaccagtctggggaacataatgagaacctatctgtacaaacaatttttaaaattagctgggtaaggtggcatgcacctgtagtctcagctacttgggaagctgaggcgagaggatcacttgagccaggagttcaaagctgcagtgagctatgatcatgccactgtactcttgcctgggcaaaagagtgagaccctgtctcaaaaaagaaaagtgtaaaatatccaggatagctctttagaaatggaaaagttcctggaaatatccatgctggtggtagttgtgattatggagacactccaggaaaagcagacatctctactgggaatagtcaggtgcagaagttcagaggtcttagaaattatataggcattgtatcctttaaaaggccttgctgttttgagtacctgggagttatactactgctaaaataaattacataaagtacagggcttggtggacttgatgggacttcataacagaggcattctgtctgtgatccacagagagctctgtctgctgtgtattattcatataaaccaattgtaaagttgaaaaatcaggggacaggcgtggtggctcatacctttagtcccagaactttgggaggccaaggtgggaggattgcttgagcccagaagttcaagagcaatctgggcaacatagtgagactttgtctctaaaaaaaaaaaaagagaaaaggggccaggcacaatggctcatgcctgtaaccccagcacttgagaggccaaggcaagagactcacttgagcccaggggtttgaggccagcctggacaacata[136 bp omitted]cagtgaaactccgtctctactaaaaaaaaaaatacaaaaaaattagccaggtgtggtggcaggcgcctgtagtcccagctactcgggaggctgagg[132 bp omitted]ggctcatgcttgtaaacctggcactttgggaggctgaggtgggtggatcacttgaggtcaggagttcgaggccagcctggccaacatggtgaaaccatgtctttactaaaaatacaaaaaaattagccgggcatggtggcacatgcctgtaatcccagctactcgggaggatgaggaaggataattgcttgaacccaggaggcggaggttgcagtgagccgtgatcgtgccatgcactccagcttgggcaacagagcaaggatccatctaaaaaaaaaaaaaaaattagctgagtgatggagtggtaattagctgagtgacggagtggtgtgtgcctgtggtcccacctacttgagaggctgaggcaggaggatcacctggggccaggaagttgaggttgcagtgagctgtgattgcaccactgcactgcagcctggacaacagaacaagatcctgtctcaaaaaagaaaagaaaaagaaaaacagaactatggtaagtcagggactgtctttctgtgttgttagcattaaatgcattctctttttttttgagatggagtctcgctctgtcgcccaggctggatggagtgcagtggcgcgatctcggctcactgcaagctccgcctcctgggttcacgccattctcctgcctcagcctcccgtgtagctgtgactacaggtgcccaccaccacgcctggctaatttttttgtatttttagtagagacagggtttcaccatgttaaccaggatggtctcgatctcctgaccctgtgatctgccagccttggcctcccaaagtgctgggattacaggtttgagccactgcgcccagcctaaatgcattttcttttctttttctttctttctttctttttttttttttttttaagttttggttgccagggaggatcctaacacatttcaaaaaattttttgagacaaggtctcactctgttgcccaagctggagtgcagtggctcaatcatggctcactgcagcttcgacttcccaggctccagggatcctcccaccttagcctcccgattacctgagactatgggtgtgtgccaccatgcctggctaattttttattttctgtagacatagggtctcactttgttgtccaggctgatcttgaactcttgggctcaagtgattctcccacctcagcctcccaaactgctgggattacagacatgagccactgcatctggtctaagtatatttttaacttatattttcaacttatgatgggtttatggggaagaaatcctatcataagtgaaggagcatctgtgttttgcttccatggtgcataatcatctggaatcaggatgtactactatgaatgttgacaggaatactaccttgagctagctgaaggtttgggattgctggaaccttaagcaagggcatgataaatgtagttatttaaggaaaaagggttatgaaatgttgcatgtaagttggcaagatctgaaaattccgggacccaacattggcttggtgagttctactttgttcttgtagctagatgaatgtttctgccaaatcactttcccacacacagttaaaacatacagtttgcagatctctctgccatttctagggtactatatcttacgtagtggtgtgtgaatgtgtgttttgagacagggtctcgctgtgtcacccatcctggaccagcttggcgtgcagtggtgtgatcatggctcactgcagcctcaacctcctgggctcagatgatcctcccacctcagcctctcaagtagctgggactacaagcacacgccaccatgcctggctaatttttaaaattatttttggtagaggcggggtctcactgtgttgcccaggctcgttttgaactcctgggctcaagtgatcccctcacctcagcctcccaaagtgctgggattatgggcatgagctgccatgcccagcccttaatgttaatgtgcactttttctcatgttacagacctgttttctaggtgtgctccatggaagtttaagcatatgccgtaagcatttagataacatctagtccacctatccccaccttttctttttttaactgatttaactggtgagaaaaattgaggcccagagagagttgtaactcagggtcatactgttaatggcaaaagccggttcctgaatccagattttctggcccaggccagtgctcattttaacacctttaattcaaactgatcattgtcatgacatttaccatttgtgtacttaatgtgtgacaggtgttgtgctaagcattatatagctctcatcttgattaatcctcttaacaattctatgaggctggccagtattttatagatgaataagcagccttgatgacttgcctgaagaagcacagctagtaagtgctggaactaagatttcagcccaattctgtgtagttccaaagcctgtgttgttttttcttcttttcttttttgattaaatatttatgtaaaaggtaataaagaataatatgacaaatactcaacacccagcttaagaaataaagtattaccaatcatttgaagctcccttcccattacattgtcctctcttttcctccaaagtaatcatccgcattcctgagtttcaaatttgtgctcctaaccaccaagctatacagctgcatttattaagtgccatgggagctggagccactgttattcaacagtaaacaagaaagacatgttttctgcccttgaggagtttcctatgggtgataatgaaatatttgtttcttaatctttctggagatcttcagtagctggtacgaaatgtgacatcaaggaggtttaagaagtccttcaggagatcactggtgatatgttggaaggttgcctagatattacacaaatgaatcagagttaagaatacatgtgttggctgggcgcagtagctcatgcctataatccatttgggaggtcgaggcgggtgcatcatgaggttagggttcaagaccagcctggccaacatggtgaaaccccgtttctactaaaaatgcaaaaattagccaggtgtggtggtgcacacctgtgatcccagctactcagaaggctgagagacaggagaatcagcttgaacccaggaggtggaggttgcagtgagctgagatcatgccattgtactccagcctgggtgacatagcaagactgtcccccgctcccaccccgccgcccagaaaaaaaaaaaagaatacgtgtgtcttaattggatcactgattattttttcttcctagagaccaagttatagattgggtgttttgttttccgacaaggtcttgctctttcatggctcactgcagcctcaacttcctgggctcaagtgatcctcccacctcagcctcctgagtatctaggaatccaggccctgctagtttttgtatttcttatagagacagaatctcgccacattgcccaggctggtctcaaactcctgggctgaagtgatctgcctgcctcagcctcccaaagtgctgggattacaggcatgagccactctgtgctcagccttgtcttagttaatatattttccatattatccccacatagtatgtaagacaaaactttgtccttagaagacaatcaggtcaataattataaaatgaactaatagtaggagtctagacaaaaaagatgggtcatgtagaagcgtaagttaataccctgcatgttctagtgttttccctagtttgttataggcagggtagacatgagtctgggtggaactagtgctcttggataaaaaatctattacagtgtttctcagtttttgtttgtttgttttttgtttttttgagacagagtctccctctgtcgtcgttttttgagacagagtcttgctctgtcaccaggctggagtgcggtggcgccatgcaatctcggctcactgcaacacctgcctcccgctttcaaacgattctcctgccgc[134 bp omitted]gcctcccaaagtgctgggattgcaggcatgagccagcgtgtccggccgtttcttggtattttagctataagttcttttgataaatacagagctcacgtaccctctgagttccgacaccaattttcctataccaactgagtgtcatacaattcaattcaattctaatgatggcagtggcggccatctggagtggccatcagctgcagcagggaggcgcaagcggtggcagcaggagtggctgctggagcagcagtggtggtggtgggacccctgtgccctgcatccctgaggcagctgagtgcatcactcctacctcacatggctgggcaggacctgcttccaggcctggagcctccactatggcctcaacctctccccacaccgtgtctcaggagcccatgagcacccggctgaaggcgcagctgggactcgtggggccagcctcaagatcatcgggtttgtttgtgcggggttggccggggctgccacgccacctgtacctctcctgctcctgctgcagggaaaatgtggagaggaggcatgtagtccccagagcccacacctgggagccccctggagcctgatatccccagagccaccatgatggggccgggccgagttacccgttggcaggggagcagtgtgatcaggcatggaggggtggacagagaggagccccgaggtggagctgggccctgagcggtgccgcgctccatggagctggcaggagctggaagctggcaagagccccacctcccagtcgcagctgcagctgcccagccgtggctgtggacccaggcatctctgcagtctaaggggcccaggaagcctgtgggcttggagatgtctgctcctgctgcctggcctctccctgctcctggtgcccgttctgatctcagagcgaggttggggccaagcctgggtgctgttgcagcctgaccgggtgtgcgcatgcttgggacagtggtgacatgccaggcccctgccactttggcctcctctagacttcaggcactggcgagcatgggagggaggctgagatggggactgagggcagcttggtgtaggcctgcaggtaccctttggcatggccttggcagcttgaatgccagcaggaggcagacaggctcctgggcagaagggggcagatgccccgtgaagccccaccttcaggctgggagggcctgaagcccgggggctgggttgctgatcccgcagaccagtgtgggaacttgtgacgcgggtcctcccatggctgcccatggaccaatcggcacactcttcttcccctctgaggcccataaaaagcctcccggactctgccagaccagaagagagacgacggcatgacctgcctacagggaggaactaccctctctgctgagagctgaaggggtgacaggatgatctgcctgcagagaggagctaccctctctcctgagaactgaagagacgttgggatgacctgcctgcagagaggaactaccctctctgctgagagctgaacattcttcgggacagcctgccaagcagagaggagctatcctctctgctgagaactgaacacttgttgggacaccctggctacagagaggaggtactcactgtaggtttcctctgagctgttgtgtcgctcagtaaagctcctgtttgtcttgctcagcctccacttgtctgttacctcattcttcctggatgcaggacaagaactcgggacctgctgaatggtggggctaaaagagctgtaacacaaacagggttgaaacatgccccttgcttgctaccttgagagtgtagagaaggagagaagagctgcagtccttcagggagcccagacctgggagctcccttagccagggctgtgactccctctttggggccctgtggttcctggagtcgccaagcttccgggcaccactgtgttctccagtgccagctgtggaagctgcttgtgatgcgcctggtccagttgcagcctcgcagggagatggtgcccaagctggcatctggagctgcccaccccacagcagcagccggcgtgcctggctgtgcacagaggtcagaccccatgcttgctcacacatccctcaccactttgtgcctggctcacctttggcaggcgtgggatccaggctggtcgtgtgagttgagcacagcctgccaggctgagtgggtggaacgagcccagtgggccagagcaaaacttggacagaggcaccactggccacagaagtttccagttggtgaagtgactccccaacgatcccgtaacactgacaccacccagagttagcttcagatccactatagttgcccagtgggttcttctgcctgctacacagacagaccaattcactgagaccacagtattgtagtaaagaaataacttaattaacacaaggctggccatgcaggagaactaaatgtatcacgcaaattagtctcccagaaggctcagaggtttgggtttttcaaggatagtttggtgggtgggggctagagaatggaggatgttgattggttgaggatgaaatcatcgggatgtggaaaacgttcctcgtgctcagtcagccgctgattgggggccacaggatcgactgagtcacaagttgtgggttccggtagagtcagtccttcaccagaaatgcaaaaatatgaaaaacatctcaaaatgccaattgtaggctctattatcgtgatgttatcacaggagtaactggggaaagttacaaatctcctgacctccagaacaatggttggttatcatttacacctgtatcttagcagaattcaggtccctcacataatcctaaccttgtggcctttcactagttttacaaaggtggtttagttttaggaagtgctattatcattcttgctttaagattaaacagtaaacttaaattcctctcaaggttatcttggcctgttcccaggaatgaccagggacagcttggaggttagaagcaagatggagtcaactatgtcagatttctcttactgtcataattttgcaaaggcagtttcaccaccagttaaagagcaaggtttccaacaacattgcccttacttcagcagcatgcactttggcctgaccaaccacaaattcagggcttcctactaccccctcagactagagtgagtcacaaaactcgggaaagtgctatattcacgattatacaaatgaacaaccagattgaagaggtacatggggaaaggtctggaagagtcccgagctcaggagcttctttctctgtagggtcagggtgcaccaccttcctggtacattgacctgttcaccaaccaggaagctctcctgagctttgatgttcggagtttttatatgggttttcagtaggtagatgtgattaagtcattggccacgtgcttgactccagctgtttccctgttggaggttttggggtggggctgagagttctgaccctctaatcatgtagttggtttttctggtgaccagctcccatcctgctagcatgctctgttgccccctcctccccacgtgagtcacctcattaggatgaactctgtggttgaaagggactcattattcataataaaagacactcctatcatataggaaattccaagggattctgatgctctgtgccagaagctggggacaaagaccagatgtattctatgttatatcattccctcctttatattatttgaaattttaacattttattttttaccaaaaacaaattgaacacagtaattttagcatatgtttatattttaactgcctcagtagcgacctgttattcccagttctccggttgctgttaagaaaatctttgaatgctagttccagaatctccaggaggtgggaccagtttcgttagtggtgatgtcgaaaataacagcagtaccactgtgcttgggccaggtgaaatcaaatcagatgattcagtctggttgatgtgctagaggcccttttcccattcatgtaaaattggaaaattttgttcactatccaagtgtttccaaatatttggttattgtgtcaatgtagattcatacatattaagtatgtatcttgggtataaatttaagttataatttaatataaattgtgtggcacaaaagtagttcaaaggaggaagtggaggaaataagagctataggtagaatttgaaccatccttgaaagataattattaataacatttgggaaagtagaggggaaagcaggaatgatgtttagatgagggaaactgtgaggtgggcaggatttatcatggcttgtttgcacttaaacaatgcagaatggccttatttgagcaaattgagtgggggatagtgggaaatgagattaggtaggtgagctagggatagattatttatgatattcaaaggccagtagaatgatttcattttggtgtggtagataattgagagtcaaagaaagcgtttgatcaggtgagtcagaaaatgaaaagagcatgtaagaaaaatggaccagcatttatattgttggtagattaatgaggagagagactggagaaagggataggaaatttgggactgggagatttttcaataaaagtaccataattagggaaataggggaacagtgagggaaggaatgaatgttaaaaatttcaaaggaaaatttgacagatcttgactgctaaatgcagaagaatgatgaatcggagatggtacatttttaaaatttttctttttatccagatatgtaaaaagaatgttaaccaaggctgggtgtggtggctcacgcctggtaatcccagcattttgggaggccaaggtgggcagatcacaaggtcaagagttcgagaccagcctggccaatatggtaaaatcccgtctctactaaaaatacaaaaattagccagcgtgatggtgcgcacctgtaatcccagctactttggaggctgaggcaggagaatcactataatctgggaggcagaggttgcagtgagctgagatcgtgccactgcactccagcttgggtgacagagcaagactccatctcaaaaaaaaagaaagggaaaaaaaaaacaaagaatgttaactatattggtgataactatctaagtctgttacaatgtaatgtaaaagtagagaggacctagtggccatgatcagtgg[132 bp omitted]aaccctgtctctaataaaaatacaaaaattagccagacgtggtggtgtgcacctgtagtcccagctactagggaggctgaggcaggagaattgcttgaatccaggaggcggaggttgcagtgaaccaagatcgcgccactgcgcgaaaagaatagtgcctggcttatagaattgcttaaaaaatatttatcaaaggatgaaagaatgcatttaacctgtcaacttttgggtaaattttagttgtcatctttaacatcccaatttttttctttttttagacggagtgtcgctccgtcgccaggctggagtgcagtggcgccgtcttggctcactgcagcctctgcctcccgggttcaagcgattcttctgcctc[134 bp omitted]gcctcccaaagtgctagaattacaggcgtgagccaccgtgcccagactaacatcccaatttttaataccaaaaattaccttaaaaataatacttactgaggctgaatgtggtggcttacacctgtagtcccagcactttgggaggctgaggcagatggatgtcgagcccaggaattcaagaccagcctgggcaacatagtgaaaccctgtctctactaaaaatacaaaaaattagccaggtatatagtagtgcacacctgtagtcccagctacccaggaggctgaggtgggaggatcgttgatcctggaaggtcaaaacttcagtggtctgtgatggcaccactgcacttcagcctgggtgacagagtgataccctgtctcaaaaataaataagctgggtgtggtggctcacacctataatcccagcacttagggaggccaaggcaggtggatcacttcaggccaggagttcaagaccagcctggccaacatggtgaaactccctctctactaacaacaacaacagcaaaacaaaaaacaaaaaaacaaaacaaaacaaaaaaaacagggccgggcgtgggcgtggtggcttacgcctgtaatcccagcactttgggaggccaaggcaggcggatcacaaggtcagatcgagaccatcctggctaacacggtgaaaccccatctctactaaaaatacaaaaaattagctgggcacggtggcaggtgcctgtagtcccagctacttgggaggctg[135 bp omitted]ttagccaggcatggtggcacatgcctgtaatcccagctactcaagagactgaggcacaagaatggcttgaacctgggaggtggaagttgcagtgaaccaagatcgtgccactgcactccagcctgagtgatcgagagagaccctgtctcaaaaaaaaaaaaagttactgatcttttctagttaaaaaatttttgtgtttattttccaagataaccactttagtataatatattcatccagtggttttttctatgcacatacatatttatctttaaaatgggatcatattgcacatgttgacttatacctgcataaatatcatttttagaagtaaaatggaacttgaacctccaaataatgacaaaccataaaataataggataatagaggaatctgttagtctatactcatatataaataagtaaacaggcatacctcagagaaactgtgagtttggttctacactaccacagtaaagtggctcacaaatttttttgttttcccagtgcatataaaagttatgtttataggctaggtgtggtggtgcatgcctgtaatcccagcattttgggatgccaagatgggcggatctcctgagaccaggagtttgagacctgcatggccaacaaggcgaaaccccatctctactaaaaatacaaaaaaatgtagccaggcatggtggcacatgcttggaatctcagccactcgagtggctgagacatgaaaatcgcttgaacctgggtggcagaggttgcagtgagccaagattgtgccactgcactccagcttgggtgacacagcgagactctatctcaaaaaaaaaaaaaaaaagttatgttcatactatactgtagtctgttaagtgtgtaatgtaatatctaaaaaatgtacataccttaatttaaaaatactttattgtcaaaaaatgctaatgatcatctgagccttcagtgagttgtaacctttttgctggtggagagtcttgcctcagggttgatggctgctgactgattagggtggtgattcctgaaggctggggtggctgtggcaatttcttaaaataagacaactatgacatttgctgcatcgattgactcttcctttcactaaagatttctctgtagcatgtgatgccatttaatagcattttacccacagtggaacttctttcagaattggagtcaatcctctcaaaccctactgctgctttatcaactaagtttatgtaatattccaggtcctttgttgtcatttcaatattgctcacagcatcttcaccagtagattctgtctcaagaaaccacattctttgctcatccataataaactcttcatctgttcaagttttattatgagattgcagcaatttagtcacatttttaggcttcacttctaattctagctcttttcttgctatttccaccatatctgcaattccttcattgaggcttgaatccctcaaagtcatgtgagggttggaaccaacttcttccaaactcctgataatgttactttgatctcctgtgaatcacaaatgttcttgatggcatctagaatggtgaattatttccagaaggtttttagtttactttgcccacatccatcagaggaatcactatctatggcagctatatataggcttacacaatgtaaatagtaagcctaaataataaggcttgaaagttataattactccttgaaccatggactgcagactggatgtcatgttagcaggcacgaaaataatctccttgtacgtctccatctgagctcttgggtgaccaggtgtattgtcagtgagcagtaatattttgaaaggaatcttttttttttttgaggagtaggtctcaacagtagccttaaaatattcaataaaccattctgtaaacaaatgtgctgtcatccaggctttgttattccatttatagagcacaggcagaatagattgagcataattttttttttttttttgagacggagtctcgctctgtcgcccaggctagagtgcagtagtgcaatcttggctcactgcaagctccgcctcccgggttcacaccattctcctgcctcagcctcccgagtagctgggactacaggcacccaccacaatgcccggttaatttttgtatttttagtggagcctcccaagtagccgggattacaggcgtgagccaccatgcccggccagattgagcataatttttaagggccctaggattttcagactggcaaatgaccactggcttccacttaaaggcagcaacctgcattagcccctaacaagagtcagcctatccttttaagcattgaaaccaggcattgatatctgctctctagctatcgatggcatcttcttctgatacaaggctgtttcatctacatcgaaaatcttggttgggtcgtataataccagcaacttgggagaccaagacaggaggattgcttgaggccaggagtttaagatcatcttgggcaacatggtgagaccctgtccgtacaaagaattaaaaaattcactggatgtggtggcgtggcctgtgatactagctactcaggaggctaaggcaggaggattgcttgagcccaggagtttgaggctacagtgagctatgatcatcccactatgctctagcctaggtgacagagacccccatctctaaggaaaaaaagaaaaggaaacatttgtttacagaatggcttattgaatattttaaggctactgttgagacctactcctcaaaaaaaaaaaagattcctttcaaaatattactgctcactgacaatacacctggtcacccaagagctcagatggagacgtacaaggagattattttcgtgcctgctaacatgacatccagttatgtcatgcacacacacacacactcacatacacatgcatgtattttttcctccagacagagtttcaccatgtcaccccggctggagtgcaatggtaagatcatggtgctctgtgtggcctccaactcctgggctcaagcagtcctcctgcctcagcctcgcaagtagctgggactacaagtgtgtgccaccacacctggctaattttttaaaaactgttttgtagagacagggtgtcattatgttacctaggctggtctcaaactcctggcctcaagtagtcctcccacttcagcctcacaaagtgctggaattacaggcatgagccactgcaccagacatatatatatacacacacacaaacacatatatgtaatatataatatttatatatataaatatatttttatatattttatatatacgcctcataaattattctgatgcatggctttagaggtcaccattccctttcggtgttgttaacttgtattagcaatattttttaaagtatggcacaagaaagagaaagcattggcttggccatcaggagatgggttattctcttaaatctgcaactaatcttttagtaagacttagaaaatgactgtctctggatcccagattctttatctgaaaattttctggggagctgaataaactgacattgttaactagattctagcagttctgtgatgatggattcacggacatcatcagaactcagtgaaatgtgacctgtggtcagccatttgaaaaaggcctaaaccttcttacacaagtcaattgaaaaggcctgtagaaatcagagctcgaagacacctgttaaatcatctgatctatccctctaccagcggtactcggttgttcatagccctctctaagctgttttcactctccttcctgtgttccagacattcattattttcccagagactggacttgtgttcacccttttaatcatttaagaagggaatgtgacttttcttaactcaaaaaatttcatttattttatatttagactttaattttggaaactgttgataatggcagagattagtaagcatgtggactgttttcctctagattcacaaaaggatttagttgatgaatgtctaacaatagtaattatatgatcagaaagtgacgggaatacaagtcaaatttcataataaaagttaagattttaaagtttgtgtataaaaaaattgctagaatagaaaatgtaataggagactttctttgcttttaccttgttactaaccctttaaatatgatgctctatggaagaaagaatgtagagatgcagagaaatgagcattctgatattctgtttatgaggatgtaaattggtttattcgtttttggagataatttaacaacatcagttaaaaataaaaaagatcttgtgcactaacttgagttctacttctaggaatttattctgtagaaatactaattgttgcattgtttataaaagtgaaaacttagggccaggtgtggtggctcacacctgtaatcccagcactttgcgaagctgaggcaggtggattgcttgagtcaaggagtttgagaccatcctgggcgacatgacgaaaccctgtccctattaaaaatacaaaaaaaattagctggttgtagtggcatctgcctgtagtcccagctactcgggaggctgaggtgggagaatcacccaagcctggggaggttgaggctgcagtgagccaaaaaaatcacaccactgcactccagcttgggcaatcagagtgggaccctgaatcaaaaaaaaaaagttaaaacttggaaaccattccaatgttccttgttaagagtttattttaataaattataatacatcatgcag[139 bp omitted]gaaaccctgtctctactaaaaatacaaaaattagctggacgtggtgacacatgcctataatcccagctactttggaggctaaggcacgagaatcgcatgaacccaggtggtggggattgcagtgagccaagattgcgccactgcactctagcctaggcaacggagtgagactccatctcacaaaaaaaaagagatttaaaaaaatattaatataaaatgggtttattattgctgcttttaaaaattggttaaaatacatgtaacaattattttaactgtaagtatacaattcagcagcattaaatttattcataatgttgtgtaaccatcaccactatctgtacttaaaacttttttattatcctcaacaaaaactatgtacccattaaccagtaacttttgtcttctcttctaggagtttttatgtactgacatgaaatactgcccaaatgcataattaagtgataaaggaaaattgcaaagtagtgtgataactatgattccattgtggtaaaatattgcaagttaatataagtataggaaaaatctgggagaatattaaaatgttagtagaggatgttaggagggatttgtacttttacagaatatattttggcaagtttttaaaaaagagtatgtgtgacttttctaaacataaagatatacttttaagtattatactaaaacttaataatttggatgccttagattttagctaatgagtaacagactgccttatgtggttgccaaatttgagcttatgtagaacctaacactttattaaagtaacgatttttcttttcacagctagagttgggaagacatcactgattatgtctctggtcagtgaagaatttccagaagaggtaaacattttgatttccatatttaaattttaaaaaatttatcaaaatcaaattaaaatgaactgaattctgtctcttttggcatgtgttatgtgcttccttttggacagttgagacttttttttctcccttctttagagacagggtctcactctattgcccaggctggagtgcagtggtgccatcatagcccactgcaacctccaactcctggactcaagcaatcctcctgtcttggcctcccaaagtgctgggattacaggcatgtgccactgtgccctgccagttgagactttttaaaaagctaatatttgtttatcacctgtatctatgaaatacagtataggagaaataaccagcctgtgtctaagttcatctaagtcttttgcattttcttcctttgactttgtctaggacctttgtattctctgtgtctcagttgtctcatctataaaatggaagctgaaagggatataaatgtcatataagctctgtgaccctttcttaaaaataaaatgttgctcataaacccaaaacataaaaaagataatgagcattccgtgagttgaagttaaggggaaagatgtgaatccctacttgccttctgcctgacactccctggtctgtgaggtgtttttgtcggaaccactagaattatgatacatatatttgaaaacctttaatatgatctacctgcttcattttacaaatgttgaaacaaactcattccacctttgcctacctcaaaggattgttatgggtctcaaatgagatgaacttaatagcagggaagtgccaccaaaagtagtaaggtggttttattattactggcaataaatttacattttggaagttctagagtgaggagctgttggctaaactttgcataaagttagcatatagttatagggaatgaaatttgtgcaatgggatgaaaatgatttcaaattaccctctttcttgcatagtaggtatcattagtgtcacagtttacatttatccttcctttactctagtttagataggaatatctgtataatttcattgttcaaataggaatttgatgtatcatgtgatagtgttttcaacatttacagctgccaaaagactatttattattattttttgctttttttctcttagacaagatggttaaataagtaattgcttaatttaagaaatgaagtatattttcgtgtattatttgtagaatcagtaacattaatttataattactctgggtataacacctaaaagttttctgtgagagttttagtttagaattgttttagcatactcctcttgattgtggataagggttttgtgtttttggttttttaaaatttagtttttcacttttttagggattgtaagtaatctagaagggtttttaattaatttttaaaaatt[136 bp omitted]catggtgaaaccccatctctagtaaaatacaaaattagccaggtatggtggcgcatgcctgtaatcccagctacctgggaggctgaggcaggagaatagcttgaacccaggggcagagcttgcagtgagctgagatcgtgccattgcactccagcctgggcaacaagagcaaaactctgtctcaaaaaataaataagtgaatgaaaaacaagcaaacataaggcttatgtagccagtcaattattttctagaggaaatgaatgttgataacctgttggtttatttgcagattgttgtggatttaaatacctcctcatttgcagagtatcttcagccttcaacaaaatagaatgaaaacaacatatttaaaaaatctaacaccgaaacaccaaattaatccaagaatccactgagtctgtgtcacatctgaagtatccttaatgtattgtgtctatgtagatagaaatacgcatttaaaatgtttttatcctatagttttaatatatatttgcatctgtggtaaagcacaaaaataaacacttatatatacaacaaatgggtattggtgagaggggtaatacaagttgagcatcctttatccaaaatgcttgggaccagaagtgtttcagatttcagatttgttcagattttggaatgtttgcattatacttaccagttgagcatttccctaatctgaaaatcagaaatgctccaatgaacatttcctttgagtatcatgttagtgctaaaaagtttagaatt[137 bp omitted]tactaaaaatacaaaaattagctgggcgcagtggtaggcgcctgtaatcccagctactcgggaggctgaggcaggagaatcacttgaacctgggcagcagaggttgcagtgagcagagatcgcaccactgcactctagcctggaccatagagtgagactccattaaaaaaaaaaaaagaaaagaaacactcaacctgtgtagataaatttatatcatctattacaagtttgagtgataatattcaaaggtgtttttttttttctatatttgtttgtaaatgaaggttcctccccgggcagaagaaatcaccattccagctgatgtcaccccagagagagttccaacacacattgtagattactcaggtaatgaatatcctcttgtagatgaaggtgtaggttaatttaatagacttgaaaaaagatacttactgagcttttacaaatgttcagagaggtggtcttttctctgtagcagtaaatgatcctttacgattcttatctcatttatgtctgtcaacctctaccctataccccacccagtgcctccatctgacagttcttcgtccccagattactaagttgggttccataatacctgtggctgttgaacacttgaaatgtgactgttctaaatgaaaatgtgctgttaattgtaaaatataactggattttgaagacttagtatgaaaaaaggatgtaaaatatgtcattaatttttctattgagtacatgttgaaatttaaatacttttgatattttgggttaaatgaaaatttaattttaccttttttacttacctttttaaaggttgctactaaaaaattgaaaactatgtatgtggcttgcattatctgtatgttggacagcactgtactgaaagctgagggaggtgaatgacttctgctacaatcagtctcataactagatttatttacagaattattcttcaatatgtgtagccatataattagattcacctcagtattagaattgaagccttaacccattgattacttaacatatggaaagatattaaaaatatggcctgttatttagcatagtataaaataccattgaattcatgtatgatattagtttatatgtcagaagtaacaggcatttttaggggaagatatatgtaacctaaggtggtctaaatcagtatgccagtaattgctttgctcttcaattatttgctttctatcctagctatatcattcatatccctgcatgcgtggaattgcaggcacacccacccattgagaccagttctagctaaagatacatgctagagagggaattctcatcacttcattatcaagctacagttttgcctctgggtcttggttattattactcccacctgctatctagatcttaagcttgtattacccagaatctcacctgccttttgatcctgtgtgtatagactctttgtccgagcttctgactcttcagcacccagtctgctagcttggatttctgaagtcctttgcctgacccttttcaactctggaccagatgctggcctagatttattacacaatgcttctgctgttccatgcctgagttatccttttatagactcgtctttcagggccagctgccttatcgtagttgaaccttttccttcccctggctttcccttgtgtttgctacaccatgtcattttgagggatgttagatgagtgttgcatagaatttagcttggccattagtttttatgaaagtgtctgcaatatgaaacattgacttcctgtcatttgtagaagcagaacagagtgatgaacaacttcatcaagaaatatctcaggtgagctttaaaaaacagaggtgtggggttttgtgtagaaaaacagtgatgattttatgagcctgcctttttcattctctttgtttgttggtttttgtgttttttttgggaccgtgtttcactctgtcacccactctgtcacccagtgcagtggcgcaattttgccttatcgcaacctccatctcgcaggctcaagcgattctcatgcctcagcctcccaagtagctgggattacaggcatgcaccaccatgcccagctaatttttgtattttagtagagatggggttttgccatgttaaccaggctagtctcaaactcctgccctcaagtgatacaccccgtccctttttcattctcttaattaccaaaagttcttttgcagttctttattgttatggctgttactgagtatgtgtttttgctttaagtccttaggaacattttctcttagaggcaagctaattctttttttgtttttttgttttagctgttaaattttttcttcctttcacccgaatatattaataagttgctaattaagtgctgtctatgtttttattatttttagatacgattaatttgttaatttttcttctaggctaatgtcatctgtatagtgtatgccgttaacaacaagcattctattgataaggtaggtgtgatctttttttccctatagttggtttcagtggagtgcttccaaagttgattctcagtttagaattttaggggtctaagggaagagtgttttgtaaagatccttatcatggctaagcgcttgttaattttcattttaggtaacaagtcgatggattcctctcataaatgaaagaacagacaaagacagcaggtattttttcctctctcaaactttttataattaaaaagtttaaagcttgcagaaaaggtacaagaagtagtacattgaacttccctaaatccttcacttaaatttactaggtaacgttttgccacgtttgccttatctatcagtttttctgtctgttcatacacacacccacgtgccttttttggggggattcatttgaggcagtagatatacttgagagcaaagcaagaaacagaactctgatatcatgattcacaacttcagacagattattttggtcataaatcttacatttctcttcctcaaactgctgcttgaaaagtctcagttttatttatttatttatttatttatttatttatttatttatttattttgagacagagtcttgctctgtcgcccaggctggagtataggagcacaatcttggctccttgcagcctccgcctcctggattcaagtgattctcatgcctcagtctcctgagtaactgggactgcaggcatgtaccaccatgcctggctaattttcgtattttttagtagagagggtttcgcacgttggtcagtctggtctcgaactcatgacctcaaatgatctgctcgccttggcctcccaaagtgctgggactacaggcaagagctactgtgcctggcctgaatctttttaaataggaaaatcagactaatatctatatattgtacacatttagtccttttctcaattttttagatttctcttttagttggaagtttttgtgccttgaaacgctaaagatctggttctaaacatatgactatggtcattaaccctctgtcttacatattttggaagggagactgagatgacattatatgtgctgtgagaaatgctgtggcattgtatggcttctcttttatcatggttttaactttgtgatgatttgacaaggtggaaaggaaagaatgaccctttagagctctgctgtccagtgtagtaggctctcgtcagttgtggtgatttaactttaaattaattaaaattaataaaactaaaacttgttcctcggatacacttagccacgtttcaagtgctcatagccacatgtgactaatgcttacagtaatggagagtagagataaagagcatttccatcatcatagaatgttgtattggacagggatgccttgggggatccaatacccatatgttcctaatatctgcttttcttg[194 bp omitted]gtgggaggcgcctgtagtcccagctactcgggaggctgaagcaggagaatggcatgaacccaggaggcggagcttgcagtgagccgagatcacgccactgcactccagcctgggcaacagagcgagactccgtctcaaaaaaaaaaaaaaagagccccatcgagcctgcagatggctgcagcccccagtgacatctttctttctttcttctttttttttttttgagatggagtttccactctgttgcccaggctggagtgcagtggtgcgatcttggctcactgcaacctctgtctcccaggttcatgcaattctcctgcctc[134 bp omitted]tggcttctcaaagtgctggaattacaggcatgagccaccgcatgagagatgctgagtcgatcgaccacccagctaggccactcccaaattcctggccggaagaaactacatgaaataataaatgccctccccccccccagtgatctccctctcttgccgagtctggactgtactgccgtgatctcggctcactgcaacctgcctgcctcgggctcccatgattctcctgcctcggcctaccgagtgcctgggattccaggcacgtgccaccactcctgactggtttttgtatttttggtggagacggactttcgccgtgttgaccgggctggtctccagctcctggcctcgggtgatctgcctgccgtggcctcccgaggtgctgggattgcagacggagtctcgctcactcaatgctcagtgttgcccaggccggagtgcagtggtgggatctcggctcgctacaaccttcacctcccagccgcctgccttggcctcccaaagtgctaagattacagcctctgcccgcccgccaccccgtctaggaagtgaggagcatctctgcccggctgcccatcgtctgggatgtgaggagcgcctctgcccggctgccccgaatgggatgtgaggagcgcctctgcccagccgccctgtctgggaggtgaggagcgcctctgcctggctgccccgtctgggaagtgaggagagcctctgcccggctgccaccccgtctaggaagtgaggagcatctctgcctggccaccccgtctgggatgtgaggagcgcctctgcccggccgccaccccatctgggaagtgaggagtgcctctgcccggccgccaccctgtctgggatgtgaggagcgcctctgcccggccgccaccccgtctgggaagtgaggagcgcctctgcctggcagccctgtctgggaagtgaggagcgcctctgcctggccgccccgtctgggaaatgggaagcgcctctgcctggccgccccatctgggaagtggggagcgcctctacttggctgccccgtctgggaaatgggaagcgcctctgcccggccgccccgtctgggaagtgaggagcacctctgcccggccgccaccccgtctgggaagtggggagcacctctacctggccgccccgtctgggaaatgggaagcgcctctgcccggccgccccgtctgggaagtgaggagcgcctctgcccagctgccaccccgtctgggatgtgaggagcgcctctgcctggctgccccatctgggaagtggggagcgcctctacctggctgccccatctgggaaatgggaagcacctctgcccggccaccccatctgggaagtgaggagcgcctctgcccagctgacaccccatctgggatgtgaggagcacctctgcccggccgccccgtctgggaagtgaggagcgcctctgcccggccgccccgtctgggaagtgaggagcgcctctgcccggccgcccatcgtctgggaagtgaggagtgtctctgcccggccaccccgtctgggaagtgaggagcgcctctgcccggctgccccgtctgggaggtgaggagcgtttctgcccggccgcccatcatctgggaagtggggagcccctctgcccggctgccccgtctgggaagtggggagcgcctctgcccagccaccccatctgggaagtgaggaacgcctctgcccggccaccccgtctgggaagtggggagcgcctctgcctggccgcccatcgtctgggaagtggggagcgcctctacctggctgccccatctgggaaatgggaagcgcctctgcccggccaccccatctgggaagtgaggagcgcctctgcccagctgacaccccatctgggatgtgaggagcacctctgcccggccgccccgtctgggaagtgaggagcgcctctgcccggccgccccgtctgggaagtgaggagcgtctctgcccagccacccatcgtctgggatgtgaggagcgcctctgcccggccaccctgtctgggaagtgaggagcacctctgcccggccgccctatctgggaggtgtacccaatagctccgaagagacagcgaccatcgagaacgggccatgatgacgatggcggttttgtcgaaaagaaaagggggaaatgtggggaaaagaaagagagatcagattgttactgtgtctgtgtagaaagaagtagatataggagactccattttgttctgtacttagaaaaattcttctgccttgggatgctgttaatctataaccttacccccaaccctgtgctctctgaaacatgtgctgtgtcaactcagggttaaatggattaagggcagtgcaagatgtgctttgttaaacagatgcttgaaggcagcatgctcgttaagagtcatcaccactccctaatctcaagtacccagggacacaaacactgtgtaggaaaaccagagacctttgttcacatgtttatctgctgaccttctctccactattatcctatgaccctgccacatccccctctccgagaaacacccaagaatgatcaataaacattaaaaaaaaaagtacaagaaaaaaaaaaagaaataataaatgcttatttttgttttaagccaaaaaaaaaaaaaaaaaaaagagggcagttttgctaagatctatcaatctatcaagcaccagcttggaccactgaattaaacaattttggctttaccatgacagcttcccaagtagctgggactgcaagtgcgtgccatcacacctggctaatttttaaaaaacttttgtagaaacagggtctcactatgttatccaggatagttttgagctcctggtctcaagcagtccttccgccttggcctcccaaagtgctgaaattacaggcgtgagccactgatgcacacctttggttacaaaccactacatttttggaaaccctcctggttctggtaggaatttatatttgggctatatggtggtcggtcttttcaagcataatggcacaccaagggttaggtaagctaaatgctttcaagtgcttctcttgcagtctagagttccagcaggatgatttgctttccctccaagctctcttgcaggattcacaacagttctccactaggttggtcctccttaatatccccattaagatttttccccacagacttatcagatttaacttgtctaaaagaaaatctttaattccctgcctactcgctgccaaaaacagaaacaaaaaatcattcttaatcttctgtatcttctgagatctacccatttttttccagccaaaacctaaatatttttcttggtttctgcttttccctcaatcttcacatctaacctatcagctgtttctgtcttataaaatatatctgaaatttgaatattttccttttcatctttactgtcactgtcactagtccaagttactattatattttttaaaattttcactaagaaatttttaaaaatttgttagtgatagtgaaaaaatgtaacatatactgaggtacatacctgttatccagcttcaacaattaactcatggccagtcttgtttcatctattacccctcccattgagatcattttgaagcaaatagagacattattttcatgctgtatttcagtatgtagctctaaaaatcactgcatttaaaaatgttaacccccttcttagaatcattcaatgacttcccattttacactaacaataaaacctacactccttactgcagcttgtaagtccttatgtgtctgacctttgatcctctttctaaccccattttatacctttttctctttactcagtactctgtagccattctggcattttcctgttgtttggccccatcaggatgttttttcagtttggggcctttgcacatgctgttccttcctcctcgcttgctcttccctgactctacatggcagatttcatcttatccttcaccccttggctcaaatgtcacctttacatagggagttttccttaattactatacataactagctccttcccactactctatccccctatttatttcctgcatagtacttactgaattggaaattattttatttgcttattgctcattttctgtttttcactattggaatgatcaggtttatagatctgcccaggcatagtagctcatacctatcatcccaacactttgggaggccagaagtttgagactagcctaggcaatatagctagacccttctctacaaaaaaaaaaaatttttttttaatttgctggatgtggtggcttgtgcctatagtcctagctactagggaggctagggcaagtggatcacttgagcataggaatttgaggttgcagtgagctgtgatcctgccactgcactccagcctggacaacagagctagaccctgtctcaagaaaacaaaaaacaaaacagaatgggtaggaccttctgtcttgtgtccttaatacttaaagcagtatgtggcttataataggtgctcaatagataacatgttgagtaaatacgtgctatctagggggctcaacctgactgtagagaaaggttcatgttgttgagaagattaaataaaagctttttagttagaatgggttatgatataaattaaaatataaatttaatgtcttttgccttccttattacaatgtgccctgtttattttaggctgcctttaatattggttgggaacaaatctgatctggtggaatatagtagtatggagaccatccttcctattatgaaccagtatacagaaatagaaacctgtgtggaggtatgccttgtaatttgatttgaaaatttatttttaatgaattcttactaaattcgggttttaaataggggggacaatgtgggatggaataaatttcctgctatttgtgaagtcacgtaaaccaaataaaacagagaagttggagttggcctctgaactctttctagacattcatgttgtgatgtccacaaagatgcatttttcgttttttttcaaggaatcttttttttgccttatgttgataatttgaaaattgtttttagctctcataattgatttcagagtgtaaaattttattttttcagtgttcagcgaaaaacctgaagaacatatcagagctcttttattacgcacagaaagctgttcttcatcctacagggcccctgtactgcccagaggagaaggaggtaacaggctgtgtttataggggctggaatgtgtatgtagtaactctagtatggtagtgatttttagtaactcttaagtatttgtgtagagattaaactgctgaaatttaaatttattgcttattaaatggttacattttggtactcttcttcaatgacattcacattaaatattcgtaatattttccacatcaatggaatctaatcaagtactgcttcaggaagtgccattaaaacaaacaagaattggcaacaataacaacaaaaaagtcctccaaagacttagctaatggtcttcttgttttgctactataaaatctacaaactgaaaaacacacacaaataaaaacattatgtagttttttgacataggcacaatgtaatacaatgtgactactacttttgtttttgttttttttcttttgagacagaatcttgctctgtcactcaggctggagtgcagtggcacgatctcgatctcggctgactgcaacctccagctccggggttcaagtgattctcatgcctcagcctgccaaagtggctgggatcacaggcatgcgccaccatgcctggctaatttttgtatttttagtagagacagggtttcaccatattgcccaggctgatctcgaactcctgacctcaagtgatccgcctgcctgggcctcccaaagtgccgggattacaggcgtgagccactgcgcccagccccttttgttttatagctaagaaacacagtaactccttattgaaatatccaaaatttaatattttgccatagacattgaaaaactaaatttttttgagatatatctcaagtaccttaaaattcatccttttaaagttgtactattccgtggtttttagtgtattcacaaagttatgcaatcatcaccactgtctaatttcagaacatttcatcaccccaaagagaaaccctgtacctattagcagtcactccctattgtcccgttactcagcccctggccaccaccagtctaccttctgtctctgtggatttgcctcttctggacattttatataaatggactcataccatatgtgaccttttgtttctggcttcttttacttagcgtaatatttccatggtatatccacattgtagcatgtatcagtatttcatttctttttatggcccgataatcattttatggataaaccatgtttttggtgggttttattttttttattttttatttttttttattttttgaggcagagtctcattctgtcacccaggctggagagcagtggtgtgatcacagctcactgcagcctcaagctcctgggctcaagtgatcctcctgccttagcctctcgagtagctaggactgtaggcattcgccaccgtgcccagctgattttttttacttttattttttgtaaagacagggtttcgccatgttgcccaggctggtctcaaactcctgggctcaggcagtcttcccgcctccacctctgcctccaagagtgctgggattacaggtgtgagccaccgcacctggctggatacatcatatttagtttatccccatatctgttgatgcatattgagtagtttctacttttaggctattacgaatagactgttgtaaacattcaatacaagtttttgtttgaacacttgtttgctttttttttgaagacagagtcttgctctgtcacccaggctggggtgcagtgacatgattacagcttattataacctcaaattcctggctcaagcaatcatcccacctaaacctctcaagtagctgggactataggcacataccaccatgcctggctagtttttctttttcttttcttttttctttttcttttgttttttgagacggagtttcgctcttgttgcccaggctggagtgcaatggtgcgatctctgtgcaccacaacctccgcctcccaggttcaagtgattctcctgcctcagccttccaagtagctggaatgataggcatgcgccactacaccctactaattttgtatttttaatagttatggggtttctctatgttggtcaggctggtcttgaacacccaacctcaggtgatcctcctgcctcagcctcccaaagtgctggaattataggcgtgaactactgctcctggcctactctccttttttttgggtcagggccttactctatcgcccaggctagagtgcagtagcacaatcacagctcactgccccctcgacttcctggcttcaacgatcctcccacctcagcctcccaaatagttgggatcacacctgtgtgccaccatacccagctaatttttgtatttttagtagaagatggggtttcaccatgttgcccaggttggtcttaaactcctaggctcaagcaatgcacccgccttggcctcccaaagtgttgggattacaggtgtgaaccgccatgcccggcctcttttttttttttttttttttttaaatttagagacaagatcttactttgtggcccaggctggagcacagtggtgtgatcatagctcactgcggcctcaaactccaaggctcaggccatcctcccacctcagcctcctgagtagttgggactacaggcacatgccaccgtgcccagctaatttttaaattttctagtaaagtcaggatctcactatgttgcccaggctggtctcaaactcctggctcaagcaattctcccatctcaagcctctcagagtgctggcattacaggcatgacccaacactcctggcctgttttaaattcttttgagtacatttagtagttgaattgctgagtcacatggtaattgtatatttgacatacggaggaaccagcagctattttacacaatgactggaccattttacattcccaccagcagtgtatgaaggttccagttcctccacatctttgccacacttgttattttacttttcttttttggtttattatagccatcctagtagatgtggttgggatctcattgttttgatttgcatttccctgatggctaatgatgttgtgtaatttttcatgtgcttattggccatcttctttggagaaacgtctattgcctattcaaagtcctttcccatttttttttttttttttgagacggagtcttgctctgtcgcccaggctggagtccagtggcacaatctcggctcactgcaaacttcacctcctgggttcacaccattctcctgcttc[223 bp omitted]caggctggagtacagtggcatgatcatggctcactgcagccttaacctcctggattcaagcagtcctcccactcagcctcctaagtagctgggactacaggtgcatgccaccacacacagctaatttttaattttttttgtaaagagggggtctcgctgagttgcccaaggtggtcttgaacttctagcctcaaacagtccttctgccccagcttttcgagtagctgcctttgcccgctttttagttgggttgtctttttttaaattattattaaaggtaatttttattttaagaagcgggggccgggtgcagtggctcatgcctgtaatcccagcactttgggaggctgaggcagggggatcacttgaagccaggagttcgagaccagcgtggccaacgtggcaaaaccctgtctctactaaaaatacaaaagttagctgggcatattggcgcatacctgtaatcccagctactcgggaggctgaggcacgagaatcatttgaatctgggaggtggaggttgcagtgagctgagattgcaccactgcactccagcctgggctacagattgagactctgtctcaaaaaaagaaagaaagaaacaggtccttgctatattgcccaggctggtcttgaactcctggcctcctcctgcctcagcctcctgagtagctgggattacaggtgtgagtcaccacaccaccacacccagcttgaggtgattgctttgattctgtttgtcgggagaggtattgtttttaagaataaaaagttgcagatatctttcaggaaaagtttatagtataagtgagtggttagcaatgactcatggcctaccacctattttcacagtctgtacactaaggaaacattttatatttttatttatttatttatttgagatggagtctcgctctgttgcccacgttggagtgcagtggtgtgatctcagctcactgggttcaggtgattctcctgcctcagcctcccaagtagctgggactacgggcatgtgccaccacatccagctaatttttgtatttttggtagagacggggtttcaccatgttggccaggctggtctcgaactcctgaccttaggtgatctgcctgccttggcctttcaaagtgcagggattacaggtgtgaaccactgtgcctggccatatatttttaaatgattgaaaaaagtcaaataatattttgtgataggtgaaaattatattacattcaaattttatcatttcataaaaataaagtttgattgtaacatagccatggtcattcttttatgttatctgtggctgtttgtgtgctgcaaaggcaaagtttaatagtttcaatagagcttatatgtgctactctcatctcttctcactgctgctgagtgcactactaattgcgctgacacactagacagcatttcaagtactatgtatatcactctaccaggaccttttatttatattcattgcatactcatcatgccaaagcatgaaaagaataataaagtgttttttagatgggaaagcagataaatattccaggttcaaattacagttccagcatcatctttttagaccttgatgcaaatgcaaaggaaatttccatattttgtaatccacttaactatgcaattgagtttccattaaccttcaattggaattgattaatctgcagtgtaatgacatgctaaaaggcaaacatcaagaaaataatcaaatataattttataaataccttgtgctctataaagtcataggtttgtggatatgtaccagtattggcagtatatatttgtgcaaagagacattttcaaagatgggacatgtaaaatctcattacagatcagcattaacatataaacatttgcaattaattttcatggtggacaacactaacttcaaaccccaacaaagcaaaatgttttccttccaaaaagaatttcattcttctcattaataaatctgtattgcaaaactgtactcagttatattttgagttttgtcaaaaaaactttgtagaagtttgatttctttcttactatgtaagtacctacatgacatgcttgattttgcctgttggccccaaagcctaaaatatttgctatgtggtcctttacagaaaatgtgccaactcctggtataaataattaatttgagttatcccttaatctggtgctagtttactcttattcctggtttacttttccttagttaggattcttctttctaatttactccgaatccagtatttcccaaacttacctcatcgtaatagtcactaagtgttacttgttaaaaacatagattctggccgggcaaagtggttcacgcatgtaatcccagcactttgggagg[136 bp omitted]gaggca[133 bp omitted]tagattccattctgattcagctaggtgttgtatttatgatacaggaaatttgggaaacagtcttaatactgtgggaactcttacaagaatttacctctgaggccttagcctagcagtatatgaaatcccctctattagtttgttctcagttttttaattgttactttgttctcgggcctgttattagttctgctaatctgttaatccctcatccccacccccatcccacaagagtaaaatatctaccaccatctgttactcagttcttaggtggacctgagtgagaggtaaaattttcaacttttaaactataccttgttttacacaagtgcaaactttaaattgcctataacggaatcttttatttagacaacaacaatatcttttcttttcttttcttttttttttttttttttgagatggagtctctgtctcccagggtggagtgcaatggcacgatctcagctcactgcaacctccgcctcccaggttcacatgattctcctgcctcagcctcccaagtagctgggattacagggatgcaccaccatgcctggctaatttttgtatttttagtagagatggggctagcctggtctcaaactcctggcctcaagtaatttgctcgccttggcttcccgaaagtgtgtgagccaccacgcccagccaaataccataattttttatagctttattaagtagaatttttaatactttttagtagtccttttttggtgttacattttcaggtggttagtttttaaatatgacattgggccaataccttagagctctttagctttgcatttcaagctttaatgaaaagtgcatcgttggccgggcgcaatggatcatgcctgtaatcccagcactttggggggccgaggcaggcagatcatgaggttaggagatcgagaccatcctggctaacatggtgaaaccccgtctctactaaaaatgtgaaaaattagctgggcatggtggcaggtgcctatagacccagctactcgggagactgaggcaggagaatcgcttgaacctgggaggcagaggttgcagtgagccaagatcgcacaactgcactccagcctaggcgacagagcaagattctgtctcaaaaaaaaaaggagaaaagtgcattgtttatttttcttaaaattactttttgaaaatgtatccctttattatgtgaggaaaaatcacttagacaaaataaaagattaggttctgttttgtatattcttgctattgcttcttttggaaacatttaaattattaaacttttttaaaaggagagtaaataaaatataacaatgtagtttttattaatctttaatgactaacaggatcacatttatagaagcattatcttaccattcattattttaaagaataaatcatgtgtgattatagatgttatagtccatttagtactcttttataagggaagccccgtcagatgctttcttttttttgagacggagtctttctttgtctcccagactggagtgcagtgatggaatatcggctcactgcaacctctgcctcccgggttcaagcgattctcctgcctcagcctcccaagtactgggactacaggcacatgccaccacacccagctaacttttgtatttttagtagagacagggtttcgccatgttagccaggctggtctcgaactcttgatctcaggtgatctgcactcctcggcctcccaaagtgctgggattataagtgtgagccaccgcgcccagcctcaaatgctttctaaatgtttgacttctttttctcgtttctttctctttgtatcttaagttttatctttttctcactatatcaaattactctcccagagaccccatttaaaacaagaatagaaggggttaactgtgtatgtttggaagataattattttctttcctattttttaaagaatttcttttctgcatttgagtttgatagcatgatcaaagctgtcatcattaccattttgtaagttaataagtttatatttcctcaccttgacatctcatttctctgatttagatgatctaaataaagatctatctccaagcttagacaaaagtcagagctctccttgaagttttattctcaaaattgttgatagtgattaccctatagtggttatacagtgtagaagcatgtgggccttattttaaaatagtcatatatttattctatccatgatgaatcataaaacaaaaatgaaggaaattgtcagaatatatttccagcagcattagtcataaaagttttagagtcacaaaaggcaaaattctttttaaagtataaataattcttatactaggaagttagtaaaaattttttacacttattaaccagtgataattttgccacttgtttgtgaataagcgtattttatttcccagctttaacatacacacaggggaaagatcaaaacaaatctcattctgctaccagaagtctgatgatcagaaatcagaagttgaggggaaagtccttagtagttttaaaagtcagttcatatcctctatggaatgagggaagatataaataaataaacagttcttctttctgtgactagaaaaatgaatccctcctaaagatgaacttctcttttccctgttcttagaggatttgtggtcttaaggggagagcttgaccattccaaatatcagtcccagcaaatattgcctcatttacttaaaaaggcttgcatataaagtaaatggctttgctttagttcatttttccatgttggttgtatttgatattatgtaaaaataatcagaattattctcagcattgcttatgaaaatcacagtttaaacaattatttcttttctcaatgatttatagatgaaaccagcttgtataaaagcccttactcgtatatttaaaatatctgatcaagataatgatggtactctcaatgatgctgaactcaacttctttcaggtaatggtcctttatttcagacatttgcgtatctttttttttttttttttttttgctgaaagctgtaaaatgtgttagcttaaacaacaagaacagtatgttataaacataagtttctttctcataaaactatctttcacatcaacctatatatgcctaaactctcttatgctcaggaattgaggggattctgatagcttcattttatggtataaagtgggtgtgttaaggatgacttggagtctgaactctgaatcattttgctttcttggttttgaataacatagctacagaaagagccctgtgttttagaaacaggatggagggagttgggaatgtttctttctaagaatgacatgttttactttttttttttttttttttgtttttgagatagagtctcgctctgtcacccaggctgtagtgcaatggcgccatctcggctcactgcaacctccgctgcccgggttcaagcgattctcctgcctc[215 bp omitted]tattcctaatgtagaatatgtttctttggttgcaattcatggatttaatattgctttgtagattatcattttatattatttgtggttttaacgctggtttgtttttaaatatatttttatgttttttgctagaggatttgtttcaacactccattagctcctcaagctctggaggatgtcaagaatgtagtcagaaaacatataagtgatggtgtggctgacagtgggttgaccctgaaaggtgggtaaatggtatttttcccccttttgaaacttaatattttcaaaatttggcagaaggtgaaggtctttattgcattatttatactttaaggaaatgttaatatttactagtatgcctaaagtctgatttggatatttatgagttgggagggacaggccattgttggggattatcatctttactaccaatataaattagaggtagggaaattggttggatctcaaggatacagaggtccacctgatggaaggagatatctggaacaaaaaaaaagtatcttaaaattcttcctactcataaacagcctttaaatagtcattatttttagggaattttgtctatgagtcaaatttaccagtatagaatgttccctggagaatatattatagaggcacagtgaagttaatgagattgaaaaccagaattttccatgacaaaaataagctcaaagatctgtagaacactactctcatataactttgtgcatgtcagtatattccttgagatgcaatgttggccatttcctctagtgctctctcttgctgagctgggtgtatatgtgaaacaattctgaaatcagctctgtttcattgagatacttgtgaattttgttttgttttgagctttacaatgcaaagctagcatccgtatgttcatgaatctggttcttgccattatgttacatgcttttctcctatgtgactctgtacactttatttactaatttactttatttcaggttttctctttttacacacactttttatccagagagggagacacgaaactacttggactgtgcttcgacgatttggttatgatgatgacctggatttgacacctgaatatttgttccccctgtatgtacctttgttttttttgttgttgttgttgtttaattttttattgagacaggatctcactatgtttcccaggctggtcttgaactcctgagtcaagtgatcctcccaccttggcctcccaaattgctgtgattaaaggcattgagccatgcccagtcacctttggttttgtaatgattttacttgttaaatatttttaaggttgatttagcacacatggggaggtgggcttcaagctaattgggaatattttagaattatagcagagctttatagcaggatttctcaacctcagcactattggcattttggaccagaaaattttttgttgtggatgtcctgtgcagtataggatctttaccacatccgtagatgtcagtgacacttccagttgtgacaaccaaaactgttgagaaattgccgaatgtaccctctgaagtgaaattatccccagttgagaaccactgattccctcatggctcaaacttttcctcttcttgtcgagactacaagtatctttttttgttcattttactgaggaaggaaaaataagatgctagacaacaaacttgttttgggagtcaagagatctcagaaatatgttgattcacatttttcttacattgttcttctccctcagttttatagcctgttcttagcttaagttgaagtaggtattttcctaaacgactggtctatttgtggttctttttctttcttttttttttttttttttcagacggagtctcgctctgtcacccaggctggagtgcagtgtcacgatcttggctcactgcaacctcccaccgcgtttaagcgattcttctgtctcagcttcccaagtagctgggaatacaggcgcccgccaccatgcccgg[175 bp omitted]tagctcactgcaacctcaaactccatggctcaagcaatcctcccacctgaccttcccaaatagctgggactataggtgtgcaacacaatgcctggcttttttttctttctttctttgttttctttttctttgtagaaaagcggtctcactatatttcctaggctgatcttgaactcctggcctcaaatgatcttcttgcctcagcctcctaaggtgctgcgattacagacatgagccaccatgactggccagttattttcctttgataatgctgtgtttaagttctgtttgtttaaaaatggacccagtgccatccccaaacaagagaccgccttgttgcaggatccttcttctataccccagggaagcgagcttttcagggatggtgacttcccaggatctggcctcagagttttcaatcattcttcattttttcattggcacattaccttcatagtgctcttttattttagcatagcaccttcagctgtctatgtaatggttcagaaagactgttgctttttacttctccgttattgaggaagcaaagttctttctgattagattcctagtccattaatcagttctaaattgaaacttcctttgactaagttactaaatcttggctcaagttaatttcctagatttttcaataaatatatactaaatgaatgaatttgttataggactctctcataaggttttcttttctgtgtcatttatgtgaatagatgaattctatgggaggttgcttattgctttcttaagtatgacagttaggaaattccacgtcttgtcgcattgtggcttacactaatcacctctttcagttttttttaatcctctttgcctttaattttctgcaaaataactccctggagctactacacgaatatttctatccttatgaaaccctctgcatctatccttcacattactgctagagtagtggataaataaataaaaatttggctctgtcacttcccttcaagacacaggataaaacccaagctgctgcttttttttttttttttttgagacagggtcttgccctgtctgtcattcaggctagaatgcagtggtgtgacatgatcacagctcactgtggcctcggcctcctgggcccaagcaatcatcccacttcagcctgccaagtagctgggactacaggcacatggccaccattcccagataatttttaaattttttgtagagatgaggtctccctttgttgcccaggctggtttctgtctttcaggctcaagaaatcctcccgcgttgacctcctaaagtgctgggattacaagcattagccaccacacctggtctaaaatccaagcttcttaacatggtttgcaaggtcattcatgatctgttctcctcatgcacactccctgccttcattctggaagtcaataccaaactatttgttgtccaccaagcatatgttcttttctacaccaggcttttgtccatgctattttcacctctctccctctcgcccccacctaattaatgcctctcatccttcaagtctcaattcagatgacaatgtttctcagcagtgttgaggttttcccagtccccaggccagagatgttccttttcatgtggctccctagcatccttggcttgcac[137 bp omitted]tggcgaaaacccatctctactaaaaatacaaaaaattagccgagtgtagtggcgggcacctgtaatcccagctattcgggaggctgaggcaggagaatcgcttgaacctggaaggtggaggttgcagtgagccgagatcgcaccattgcactccagccctggcgacagagtgagattccatctcaaataaaaaaaaaaagaaatgtctttgtggtccacctcccacttgtttgtggttccttagaagtggggagcctgtctcatttttgtctccctagtacctagctcagtacatttgctttttttttgagatggagtctcactctgtcacccaggctggagtgcagtggcacaatcttggctcgctgcaacctccgtctcctgggttcaatcacttctcctgcctcagcttcccgagtagctgggattacaggtgcgtgccaccacacccagctaattt[138 bp omitted]tacctca[136 bp omitted]ggcctcccaaagtactgggattacaggcgtgagccaccgtgcctggccacacccggctaattttcatatttttagtagagacggggttttaccatg[137 bp omitted]gagacagggtctcattctgtcacccaggctagagtgcagtggtgcaaacacggctcactgcatccttaacctcccaggcttaacctgtcctcctgcctcagcctacccagtagctgggactacaagcatgtgccaccatgcctagttaatttgtaaaattttttgtagagatggagttcactttgttgcccaggctggtcttgaactcctgggctcaagtgatcctccttgcctcggtctcccaaagtgctgggattacaggcatgagtcaccatgtccagcactcagtgcatttggttaatgtttattaaacagaatttagggtgggtccaaaaggtcaagtcaggtagaaataacttctctgcatcattttcaactcattacaatattggaattaatatgaagctcataagtatgacttaaaatttgtaggaagaacaaacccatgacaggtaaatcagtattatttgtaaattttttatattaacctgcttttctgatatttaagaaaatgggcctgctacagtggcttatgcctataatcccaacacttactgggaagccaaggtgggtggattgcttgagcccaggagtttgagccagcctgggcaacatggtgagaccccatctctacaaaaatacaaaaattagccaggcatggtagtgtgcgcctgtggtcccagctactcaagaggctgagatgggtagattgattgagcccaggaggtcgagactgcagtgagctgtgatcgtgccactgcactgtagcccgggcagcagagtgagaccctgtctgaatttaaaaaagagaaaaaaagaaaatgttgttactttggaatgagcattattatgactcttctgaagagtgccaaaatcactccagagagtttccttgggaaagtctaaatgataccaagtgaagatattcttgtaaatggtgttacctcacaaaagacttgttgcaattttatattaatttcttaaattttaacatttgattaatgatttattttactcttgaattttttcaacaggctgaaaatacctcctgattgcactactgaattaaatcatcatgcatatttatttctccaaagcacctttgacaagcatgatttggtaagcctttagctgtaattttccattatatatagtaaaacatttttctatggatgatataactctgttccctgagctatgggatgtgtatgttacatagccaaaaactgcttaacctctctaagttaaattcgcaaaaatattttctgctgtttacctttgttgttttctcaagatgaaaatgtctaatttctaatagactctcttataggttttcttacatacatttgaggaattttcttgataaaatgtaaaatttgttgtcatttattaagtagttttaaaaagcatagctttactagattggggggcttttgagttgggaattattatcttagatatctaaacattctgtatccttgtgtttcttcaggatagagactgtgctttgtcacctgatgagcttaaagatttatttaaagttttcccttacataccttgggggccagatgtgaataacacagtttgtaccaatgaaagaggctggataacctaccagggattcctttcccagtggacgtgagtatagagctcacctctttcctctagagttacaaatagtttaaaattatggtgtattacatttgtcactttgtaagcttgtgaggcattatgaaattcttcaatcataattgcctctaagcaagattagctgctgatatctctaagatgaactataaatgttctataaatttatcaggaagggattgttttcttttgaatgatatatagggaaaaagtagtaagtctttgaaaattgaactacattttagcacttttttgtttgattaagggaattggaaatgtcattgctgttgcacaattcttactctttcagaatatggggtgaagcatattttacttgacactgaagattctgtttttttgttattgtttgtttttaatgaactctttttttttttttttttgagatggagtctcactctgttgcccaggctggagtgtagtggcgtgatcttggctcactgcaactctgcctcctgggttcaagccattctcctgcctcagccatgaggttctttcactcagcacattgtggacatttttctgtatcaataagtatacttttatatatcttaatgttaaataatgtgtcacaatatggatgtcctataacttatttaactatcccataattatatatttttatcatttttgggtttttttctactatcactagtattctggtgaggtctgttgtagttcagtcttcaggtatagcctaaggaggttgttttttttggtttgtttttaacttggaaggtagatcgcataaaatatccccactctatctagattttaccagccactcaccgcttatgtttgtaagcttagtgtttctggacagatggagtagagagaggaattacccaccatcttgcattcttctccctttcttctctgcattaagaatggcagtgtagggccaggcagcgtggctcatacctataatcctagcactttgggaggccaaggtggatggatcacttgagctcaggagttcaagaccagcctaagcaacatggcgaaaccctgtctctactaaaaaatttttttaaattaaaaaaaaaattagccaggcttgggggcacatgcctgtagtcccagatacttggggagctgatgcaggaagatcacttgcacccaggggttcaaggctacagtgagccatgtttgtgccattgcactctagcgtggatgacaaagtaaggccctatctttcaaaaaaaaaaaaaagaatggcagtgtaagaaaaactatggttgggctcataggaaattaaagtagtctagacaaaaattatctaggtctggtgcataaagtttttttagctattggcttttttttccccataaatattcgtttaggaacttttcacattttaaactcttttctttcataggctcacgacttatttagatgtacagcggtgcctggaatatttgggctatctaggctattcaatattgactgagcaagagtctcaagcttcagctgttacaggtaagtatctagatactgttcagctcatgattagagatattttttaagactccattttcaaatgtaacaaagagtaagaatacactcatcttcattagtcttccatctacactctattagttttccttgtgatcagatcatttcttttgtgttgaggtgcttgattttattgtttatgaaaagaaagaaagtagagactttgcttcaagtctactccctggggttactccactgatgaaaatgaggaagagctgtgggcattaaaggatttaccagttgatcttgcgttttaattttctttaaacattaaaaataatgcgtattaactgttttctgtattaatacagctttcacaaatcttgtaagccaggcattcttgccaagcaatgtgcaccacttaaagtaaaccatatgtatggaaatagcaagttaaggaactgatcatttcaagagtttcttatatccctgttggtggaaaatctgccatatcttatgggaagccctagcacaagaagacagcctttcttaaattgacagagcaggtaccctttaaaatacttaaccaattagacagtatttaattcaacaccagagaataagaaaacagtcactagccagccatgaggttctttcactcagcacattgtggacatttttctgtatcaataggtatacttttatatatcttaatgttaaataatgtttcacaatatggatgttctataacttatttaactatcccataattatatatttttatcattttcggttttttttctactatcactagtatctctggtgaggtctgttgtagttcagtcttcaggtatagcctaaggaggttgtgtttgtttgtttgtttgtttgtttgtttgagatggagtctctctctatcaccaggctggagtgcagtgatgagatctcaactcactgcaacctccgcctcctgggttcaagcgattcagctgcctcagcctcccaagtagctgggactacaggcatgcaccaccatgcccagctaatttttgtatttttagtagagatggggtttcactgtgttggccaggatggtctcaatctcttgaccttgtgatctgcccctgttggcctcccacagttctgggattacacgcgtgagccactgcacccggctctaagaaggtctctttacctcaggaagggatgcttgctgtccctatgatacagcattgttttctggcatgcctcttttacagtttacatttgaaaggacggctaaccccaaagtgtgtgtccctttccgttttatggatccagctccaagagagtgcagatttgaaatagcatcttttagtttataatatgtgacagtttatcacagaaaaaattagatggaatataatgttggctatattcttagtaattttcattcatttataggatattttccttatgaaaatatactattttatgatgaaataaatgtttggttactcgaaattcacattccagtcaactttcagaaatgcattttttccactaactggggcccttctgcattctgtgtacttcattcacatacagcttgactgttgtacaatatgtttgtttatagatcagctacttcataaaaataataagcagcaatgccctattttgcaaaaggtggaatggaggcttagtgaatctaagtggtacatatttagtggggttttttattattattatttttagtgacaagagataaaaagatagacctgcagaaaaaacaaactcaaagaaatgtgttcagatgtaatgtaattggagtgaaaaactgtgggaaaagtggagttcttcaggctcttcttggaagaaacttaatggtgagagttctcgtaaaatacaattttatccaacaaatttttatagttactagtttacataatgttttcatagccattgacctttttagataattattagaactcaatggcctgtattagtcaagtacagtctaaatgtaacagtaatcctgttgaactgtctttgtttcattgatattagctatcatttgtctttttttaaccagtgtttaaatgggcattaaatgactacagatgtgaaagcacctaacacagtccttggcatgaagtaaatgcacagtaaatattttgaattgaatattgatatctagttcttactactcccttgagtaagaagaagaagacatatttcttttcttcttcttcttcttttttttttttttttttttttttgaggcgaggcattgctctgttgcccaggctggagttcagtgacatgatcatggctcactgcagcctcaaccacctgggcttaggtgatcctcccacctcagcccctggagcagctgggaccacaggcgtgaaccaccaggcccagctaatttttgtatttttagtagagatggggtttcgccatgttgcccaggctggtcttgaactacttggcctcccaaagtgctgggattacaggcatgtgccaccacaccctgccgacatatttctagatgggtattaatctcgatcagaccaaattatggtataatgaagattgccagcaggtggctctagaatatactttcagtaatacggatagtttccttcctttttagctactgcttgtactttatgcagaacaaatacatcttttattttaggtcttaagaactaagaaacataaaatcaatatctcctttgtactgataaatagtacacagtgtagggaagaatgcccttttatttataacacacctgcacatatacacagagatgtttgtatattgttgaaaactagttactgcagatattgagattttcggttctgttttcagaggcagaagaaaattcgtgaagatcataaatcctactatgcgattaacactgtttatgtatatggacaagagaaatacttgttggtaagaaattctgtggcatacaaaaattactaattattgggtacatttttaaatgactctttgaaaacaaattggcttcaattgaatgactctctgtagaacttctgtgtgattttttttttatttaattttttttagagacacggtctcactatgttgccctggcgagctcttgggctcgagggatctcccacttcagcctcccaaggagctgggactgcaggcatgtgccaccatgccaagcttgattttatt[138 bp omitted]atggagaaaccccgtctctactaaaaatacaaaattagccgggcatggtggttcatgcctgtaatcccagctactcgggaggctgaggcaagagaatcgcttgaacccaggaggtggaggttgtggtgagccaagataatgcctgcctgggcaacaagagcgaaactccatctccagaaaaaaaaaaaaaaaaagaattttaagtatttttatcatgtgatgattacataggtttagatataaataaaaattcatcatttaaaaaaattaaaaaaaaaattaagttggtacacttaattgtatgttagctataccacaataagaaagttgagaaaaatgggttaggcatggtggctcacgcctgtaatcccaacactttgggaggctgagtcaggtggatcacctgaggtcaggagttcgagaccagcctggccctagtgaaaccctgtctactaaaagtacaaaaattagctgggcgtggtggcacgtgcctgtaatcccaggtacttaggaggctgaggcaggagaatcacttgaacctgggaggcggaggttgtagtgagccaagattgtgccactgcactccagcctgggcaacaaagtgagactccgtctcaaaaaaaaaaaaaagtcgaaaaaactgaactccccttttactttcttctacttctatttttttttttttaaattttactttaagttctgggatacatgtgcaggtttgttgcataggtcaacccatcatctaggttttaagacccgcatgcattaggtatttgtcctaatgctctccctccccttgcccctcaccccctgacaggcccctgtgtgtgatgttcccctccctgtgtccatgtgttctcattgttcaactcccacacttatgagtgagaacatgcagtgtttggttttctgttcctgtgttagtttgctgagaatgacggcttccagtttcatccatgtccctgcaaaggacatgaactcattctttatttatggctgcatacttctatttttttaaaaaaatatttcctgtactattgactagaaattaatatgaaaaccctgctagtgcttggtagtttatctgtaatctgaatcaagtttatttagcagggaagggagtatttaacaaatatgttagccttaaaaatgtataggctactctaggcacactgcctatgggttagccctgctctgcaaggagcaataaaatcaaacaaacaataaaaaaagtacaaaagaagagctgaaaagacactatga[139 bp omitted]ctgggctcaagcgatctgcccacctcagtctcccaaagtgctgggattacaggtgtgagccacagtgcccacccctgaattttactcttgttggagatcattatagcatagatggaatatttaagaaattttataataagcaccgaagagtggcagtgaaacagaacaaaaatgaccttactgtaaagagtcatttgctttttgtttttgattagtggggagaaaaggtgtggtagaaagaaaatagatttgagaatcatatctgagtttaaattttgatttgataacttcttagatgtgtaccatgggcagctgacttaatctttctagcccgtctccttatctgcagaatgtaaacaatgcatgtagagggcct[131 bp omitted]cactgtaacctctgctttccaggctcaagcgattctcctgccttagcctccccagtagctgggactacaggcacacgtcactgcacctggctaagcttccacagaatcttaatcaccatttttagtctgcagaatcagaagatacttatttgtc[132 bp omitted]cctcagcctccctagtagctgggactacaggcacccgccaccacacctggctaatttgttttgtatttttagtataggcagggtttcactatgttggccatgctggtctcgaactcctgaccttgtgatccgcccacctcggcctcccaaagtgctgggattacaagcgtgagccaccgcgcccagccttgtctatactttctacttttaaaactggcctgaaaagttatgcttaaccagtacttttaaacttaggaagtccagggaaggaagtaataagctatcatgacttaatatatcaatattatgatacttatatttttcattatctttttcttttacaagttgcatgatatctcagaatcggaatttctaactgaagctgaaatcatttgtgatgttgtatgcctggtatatgatgtcagcaatcccaaatcctttgaatactgtgccaggatttttaaggtttgttgctcctacagactatgactgaatgtaacttcatatggactttttatggaattgcagtgtggtgtttcctaaccacaaaaatgcaacaaaatcatgtgtattttaaaaatacatacatctttaccctattcctgaaggttctggttttgttctaaagtggtagagtctcagacatacatatttctgaaagttttcgacatgtgattgtgaggtgcattcctgattgagaacttttacattaatgcaagctcttcccagctgttaaaagttacatatgtctgccttctctctgatgaaaaaaaagagtagtacatatggattatatattgccaaatataccaagaataacagccagaggaaagggataaatctgaagcttagaaagtctatcagtcacttagggattatcaataagattcaataggagtaaaaagctatatgtacaaaggtgtttattctagcattgtttttaacaggaaaaaactggaaataatcaagatggctaacaatggacgatgatttactgaagtaagataaaataatctagtggaatgttaggcaatatttaaattaaaaaataaaaacaataaatgtaaaattaaaaatagttttgaattctgaagaatatggaggacacagtattacatttttaagtggttatgtccagcatgactgcgactatacagacacacataaaaatgcatgtgctcaaggactagaggtgatattaaaaaatgaaagtagtttttataaaagaatttaggtggatttctttatatttcaaaatatgtgtgtttaatgtgtgtttttaattacatgttttttttaattgtaataaatctaaggaatcagtataggtctgttttgtcatcagcattggaaaagtgatctggatcttatttattatatgagatttacctagaccactgccaatctttgccttttggttcactttttcgctttgaaactactgttgctttgcccatctggaggaaatgcttggttcacatttaattaaatagtaatttttgaacttgttatcagattttgatttcattttttattccatagcaacactttatggacagcagaataccttgcttaatcgtagctgcaaagtcagacctgcatgaagttaaacaagaatacagtatttcacctactgatttctgcaggaaacacaaaatgcctccaccacaagccttcacttgcaatactgctgatgcccccagtaaggatatctttgttaaattgacaacaatggccatgtatccgtaagtacttgctgtcttcattttcatgttgcatggttcataacattgcatgccattattagccatgaagggaatatctttgtcacataggaattgttcagcaacagaaagatactttgtaatgagaaggtacaaatttgagtaaatgcaagtttggtttgaatgccataataaaatgatataaacagtgcttctgacaatatctgtatatttttgagcaggctgtaactatcttaatagaatagtacaataaaacacaaccccccacccagcattaaaaaatagttttactggaataaaatgggtttggcatcatgttgttttatgcttataaagcattttcatatgaacagaaagtttatatttttctgtttttgaccttaggtatatgaagttttctaaaatattttattaatttatgttgaaattgtgggtatgcttcagttaggatatgtcttttttaagtgctgtaaagagtagttgtaattggaatttctactgtataaatgttttacattaagtgttacgagccacaaatttcatgtacatttattatatatctatacatgcatatgcacaagcacataactgtggtcatctctgtagtttactaactgccttaaaattgcatggttcttaatggcattcgcctcaagtagtgtgtttgtataaattctgttttgtaacaaaatagtttttcaggcagtgcgtttctcaggactttatagcttattctacttattcttatgttagtctctaaattatttttcttcttatgaaaactacagtgtaacacagagtaataatcaaacattgctataaaccaagaatgacatttttcaaaaaggtgttgatttgtacagatttttaaagtcagttaactttactgctattttattacctaatactttttttagatgcaacaaacccttgaatttctatttgtattcgaagacaagtcattcctattattatagaataaccaaaaccttatttatgttttacctttgctttaaaactctcatgtatgttatctacagagaggatcattacagagacagactctcccgagacatgggccacactgatagaatagagaatttgagaaaaatctgggtctttctaaaaactgctttgtaagttactttttctttatgacttctgtgggattttgttgatattttcttagagaatgaccaaatctcctttcttgccataattaacatttagtaattatgtagaaacgcactgcttggtcaggcttcctgcctagctatatattacgttgtcttccttactacataaatgtacttctttaatcttgtgattacagtaactgcaagtgtgtttttacatctgcatttttaaaacattttactgtaattctgttgtgtgtgtgtgtgttatatgataaatgtacatacatggaccacttgtttatatggttaatcccaaactacttctcatgaagcatctccctgttgctaagcatactttgcatctctcctttttggtgggtggagccttgtgtatgttaaagaatcagatttgatttataaaataacagatggattccagtatgacagctggcagagacttagtagcagtgatttgttcatcatcacaagtcaaaaaaaatgaaaaaaaaatgaaaaaggaatgtcttgggcctatacaagtttttttttttaattcttgtttttcttcatattgggaattaggcattattggaatgctgctaatcgttacaaccatgccaccatgtgctgtggtctcatcagatctcataagctaagccaagtcagattgggccagtcttttgactgagaagcctataaaaaaatgttcaggtgttacaggaagtgatgtcattgattcatcaggtggcgctcttctgagtgggttctgaaccagtacctcttcatgggtggtgtgatggctttgtatgaatgagtggctctgaccactgaacagtcattggagaccccctactttggtagttagagccgaggtgaaatgggttgccccctgtgcctgcaccaactagtgcaactctcctcaaccagaaaggagtcagaaagcctccctaaatttcatatctgatttcaattggatccattgttgattttacatccttacccagagtttcatactgtcatatatagctgctgtgtttgggtagcagatgaaatcaaccctatattttatttgagtagaaatttataaagcaccttgatttagttcctttgagagccagggtgcttgatgaattaaagacgttgttgttcacatcttctcagggttgaatacacttgtcttttgactcatttgtatatttatcattcttctccttcctggttttcaggcatgtgtgtatgctgagggaggaggaggaggagggaatcgttatttaaacgctagcaaactttgtccttttggtgggtgcttatggcttactcaggttttctttttattaatttagacgagggtgccatctattgctgtgcatatttattccacaaaaattcatgtaataataattccatcccccctccaaaaaaagcaaaagtatcagctaattttccctagattttctacagggagggaggaggaagctattactatttattatgtttttggtaaatgtggaattctgcacaactttagcatgccccatactgtccttttcctttctacaaagagtgttgcttatgcctaagtcttttttttttaagttggcacaccctgacttgtgccatatttgtaagtaagaactcaactcctgtccttctgtgtgttttcgcagccatgcccggttacgctgtatgtgcacctgcaacaggtgtacattttgcatctgtcagaacttcctcaactcagacttgctgcaatctgtaaagaacaaaatcttcactgcagttcttaacaggttcttaactttatttactgggtaccaggcattctgttaaaatacaaaagaaaaaagcggataactatttattatacagatactcactacaaagacaagctgactgatgcccaactaacttccactaaaattctcactgtgatgacaatgtttagttttggaagcatccttaataatgtttttaaattaataggtatatttagaggactataaaataagattttggatgtttttttcataaggaagataaattatctttcctattaaaagataatatgtatagggaaattaaaattttttggctgtgagttaatagattaggacttttgtagtaaagaaaagacacattaatcctaaatgaaagatattatactgtactcagcttacaatgaaataatatatctcattaaaaccatagtaatgcaaacagtattttgagtttgaaacaatattctattcttgaaaccatttataattataatctgcttttaagtacctggagtgtttatttgaaagaacatggtttctagacatgaggataataaccaactttaagaactcaaaggaatgtggaaaagagaaaaagatctgtagtactgtttttttaggcctttataattgaaccaaaagcatgaagtaatcctataaagtaacacgcttttaagaaagaaagagaaaaaaaaaggatgcatatattccctcaaagcaataatcttggaaggttgtattcttatgctgatcatgctacctttgttcaaatcagttttacattttttgagcatttaagagctgaatactaatttgtacctgatgtcatatgtgtatgcattaggtttttgaaatcatttaaaagtctttgggagctgggcttgattaagatcaagctaaatattcaattttggttagaaatgggtcagttatttggctcaccattggacactcactgagggctagactttaactgtatcaaatgaccatagtttgtatccaccagcaatatagtggatgtgtctatgaaacagtgagtttatttcttctgtgagtcagaaactgattttgaaggcattctgagagtttcagtgatgtttcgagcactaacagctctggaataagaatgcaaccatctcaggtgactgctttgaagggatcaccgcacccatttggtggcaaagttctgcttctgtgctttagcaccttgtaaagtagtaacatagacagattctctcatgatgactgacagaaaatgcaaggctagttcaaaccaaacaacactcaggtgctccagtgttgggaatcgttgagttggaagagattctagaattcatctggcctaacctcctgttagaatgccttcctgcaagccttcctgagagagtgctgtttatctgctgatggcttgcctcattggaaagcatttttgcttttgcttttattatttttttttaactaaatgttttccctataactttctctctttagttttagttctgccctttagaacaacatacgactatcctactccctcttcaacatagcaatccttcaggcatttgaagacggccatcatgtctcccctaattttctcttctccaggtagaacatccccatttctttcagccttttcttaaattagatggtttagtgaacttatcattcctggttgtcttcatctgaaagccccttaggttttcacagtacctcttaaaaggtgccaccaagaatagaaagcagtgttgcagttgtagtgcgactagtccagaacagtgggcagctgtttttcacaattaggacagcatctgtctagggcatgaattaactttttggcagtcccatcccactgttgacatatattgtcttggggctaattaaagtcagatgtttttcatatgaagagacagatgtcccctcctttctgatgtgtatttgacattttttagttgatgctttaaatctaaatgcagatacatatatatctctattaaatgtcatattcttctttttgatccatttgttctagctcagtcatttcaaacattatttctgtcatttgtcccattatatatttctctaagcattgtgttatttgcagatttggtagatatgtactgtttttcaagttactgataaaaaatgatgttgaatacccagaggttggagagagagagagtgctaaactgagcaagccctatagtattccaccagagaactctttgtcaatgacaggttcaaaattcttggggaaggatttttcagtcaatgaaaaatatgttattatccagcccacattttgtcttcctgtcttatcagatatttcatgaaggatttttctaaaatcagtatataatttcttccatattcctctgatctaccaatatcataattttatctaattagcaagcaacatctatttgatgtcttattttggtgaactcaccttggctccccgtaattgctgatcacaaaccacctattttattacctattctagaaactcttgattgtccataattacagattgattcattgtctgtgtccctggtgacaattttattcctagattggtttagttagctttcaaataaaattgatttagttagctttcaaatgaaataggacagatgtgcattaaatgaatactattgtgcatagtaaattatacaatggccctcaaagagaaatcagtacgtttcggtcatatctatttataaactggtagtaatttaatggtgatgtcagcacacatcctgacatctggtaatcaagaatggaaagaatgaaaacgacaagtagaggaaccagtatacttttcaaacactccttccttatccccgttagtatttcaatcatttatttaagagaagtacagtggaattttaggggctgcgtattggagtttcttctagtttatgaaaggtaagtaagataggtaggtgggggccaaaaactcagtgcccacaggtcccggatggatactgtaaaagaatgaaggtggccaagtataagaaacaaggagaggtggggactgtgacaggcactgtctaaaagaggcagccaccactcagctctggccgtttgttgttgtacaggtctggtgttgccaggttttctggttttacaagagactggaaatcaaggctttggtgtgaaatttccagattgttagagattagcaattaattaacaaatttttaagtactaatcagaacaaagcatgtttatagtccaccagcttgcaacctcagtcttaaggtatggcctagtcatgaaaatagaggccaaggaaaaggacacatagaatgaaaatgtctctggtcccatcaccaccaccaccactttactcctttcccatgaaaaatttgaaaaagttattgggtggtgggatgagaatggaaccacctttccctgttacttctcaggttttggcagctgttactggttggtcactattggtttcctgtgttagacatatcctaatgttaggcacaaaaaagattgattgactaagtaaaagtcatttaaaattttttcactgtattttattcatagggagggttctcacctaacactaggtcctaagtctttgtttttagatatcagaactaccatgcttagtgtttgatttagaattgtgaaagagcagttctaaaaggcttgtcttttttttttttttttttttttttttttttgagatggagtctcaccctgccacccaggcgggagtgcagtggcatgatctcggctcactgcaacctccacctcccaggttcaagtgattctcgtgcctcagcctccggagtagctgggaccacaggcatgtgccactttgcccggctaatttttgtatttttagtttcgccatgtctcaaactggtctcgaactcctgacttcaggtggtctgccagcctcagcctcccaaagtgctgggattacagctgtgagccaccgcacccagctgtcatttttatttaagtaaaaagtttcattgaatgtctacaaagaattaaattagtagacaagtattggtctcaaatcagcacattgttttagtgtgcttgtaaaaattttggtcactgaaatagaaattactaccagatatgatacatgtttgagaccacattctcttattaccccactgtcccctaaccccaccttgatgtgatttattcattcagagtacttaatttaagtacctgctttaaataggaacctgctgtgaactggggcaaaatttgaaaatgaagaatatatggaacctgcctttaagcatctttctaaatattatttctctaagaaaaacattttttaactttggttatattttcagtgatgttagtccttcatgctaaaaaggaaagtgctatataacctgataatgaatttaggcagtttcaagaggttaatttctgcaagtgtttttccttttatgagaaaaaaattgtcttttttcctgaacttatttactaacacgatatattttaagtatagaaagaatgaattaaaaatttttatttccaatttaattgaacgtatattaactttgatgtgtgagagtagtgttaaacatacatctatctcacatgtaatctttctcttggtaattatgagctcactcagatctggataggtttatgttttactttagactaatttatgaataactggaattatttgaatttgaatacatgtggaggatgagtaacatgtggtcagatgattttaatctttgggactgctttcatttcaagtggtataaattacgttactggagaaaaagaccttttgaatatattttaaattttaaatatcttttaaatttgaaaatgattatatatagatgagcttgattgttggtttgaactacccaggatttttatttattaagtatttattactctgacttgagaacactcctgctttgcatgagaatgttactagattgtagtgtatcgtgaactttaatttgtccttttttaggtgtttgttttcatttgtttgtttgtgtaacttagtcattttttgatactctcaatctccttcccagctaggtttttgtgtataatctcaccacttctaacctgttatttaatcaaatattgcttattttacagtttattctttgggcgtgatttcctttgtgcatattttggttttaggatttctttcattctattttattatttgcattagccatataagttgttggttcatgttacttcttaagttcagtagcagcattttattttgacaaccaagtgcatagttcacaccgaatatttacagagacccaaaagtatgatggatagacatcatacctattgcattttttaccctatttataatgtatttttagattaaatatatgtgtgacttttaagccactcattaatgacttcatttacccatattgctttaataatcacccaagttcttcctttatgtagtttgaattcattacttaatataggagccctttattgaagaaaggattttattattgtcagacaaaaatgaactgctttttcataggattgccttatgaaaaggataggtttctaaaaatcttaatgttgttaaatgttggaaatctaagagtctttgggatattacgttatagtaaaatattttgtccaaggaagtcctgctttagtttcttatgaaacttatttattcccttgtatgaaggtccttataagactgtttgtgaatttgtatacatagtcatatatttaaagttatacaagagtttatgttatagattttcattaagtaagctgctgctgcttataatttttaaattttttgtcatttggttaatatattaaaggacatgacaaggtgaagtttgccttatctgatctttaagtatcactagttaacatatagatattggagcatttcctttgtattcatgatcatctgtaaattcagattcttctaatgcttggtgaagcatttcttgacattagtgcacacctgtgtcgtttcccaaagtatgttactatttaggcgtgctcagttaacagcttgcttatggtttgtgttgaagctgctagacactgtgtattgattccttaacctattttatcctattaaatatttatcctaatatatgtttatcctaataaatatcctattaaaatattttatgcctattggctcagttaggagaattgtcctttttaaaattgttattagca[140 bp omitted]aaaccccatctctactaaaaatacaaaaattagctgggcgtggtggtgcgcacctgtagtcccagctacttgggaggctgaggcaggagaattgcttgaacccgggaggcggaggttgcagtgagccaagattgcaccactgcactccagactggtgacagaccaagactccatctcaaaaaaaaaaaaagaaagaaagaaaatacttcaccagattgaaacatttggagaaacaaaagcagagagtccagaagactttttttaatttttaatattttattttatttatttatttatttattttgagatagaatctcactctgttgcccaggctggagtgcagtggccctatctcagctcatcgcaacccccacctcccaggttcaagtgattctcctgtctcagcctcccaagtagctgggattacaggtatgcaccaccacacctggctaattttttgtatttttagtagagacgggtttca[132 bp omitted]tgaaaatagaaaagggccaagcgcagtggctcatgcgtctaatcccagcactttgggaggcagaggcaggaggatcacttgagctcaggagttcaggaccagcctgggtcacaaagtgagagcctgtctctacaaaaaatttaaaaaaataaaaaaattttaaaacaagctgggtgtgatggctcacacctgtggtcccagctacataggagactgaggtgagaggtttgcttgagcccaggaggtcaaagctgtagtgagctgtgtttgtgccactgtactgtagcctgggtgacacaatgagatcctgtctgaaaaaaaaaaaaaaaacagagctgggcacagtgtttcacactcataatttgagcacttttggagatcgagacagtaggattctgtaagcccaggagttccagaccagcctgggcaacaaagttgtattaagacccccatctctacaaaaaatcataaattagccaggtatggtagcacgcacttggggtcccagctacatgggaggctgaggcaggaggatcacctgagcccaggaggttgaggctgcagtgagctgtgttcatgccattgcattccagcctgggtgatagagtgagaccctgtctctgaataaataaataaataaagacagaaaaatttactgtagtttggtgacctcagtatagttttcaacttgagatacgtaattacaaatgagaaaaagctaaatatggtatctctgtgccctggtaactttagatacacttctattacagttatattggttgttttagggtattatcttaaaaatctatacctgagatatatatatgggtagagttgtaaaattagaagaccattcacattagtgcatttgtacatctcttagttgtattttggaaagaataaggtggggagatgagaggagtgaaaaataggaaattcaaatacatttctgagaaattgtgtgggaagactgataaaaatgactctctggagctcctctgagtaaaatctctcagttttgcttcttttcagtattttctactgaacttttcttttcctctgcataatagcttacagtctaagacaaggttaattgatatctgggtaacaatttctgaattcttacccttccgctatgttgcccaggctggtcttgaactcctggtcttaagcagccctccaacttcagccccccaaagatctgggattacagtgtgagcctctgtgcccaaccagttcatgtttttatattcaccttaagttgcagaattaattaaaagtattttgtatgcccttgcactaaagatattcagtgcaaaggtacataggaattttggccagtctgcatatgccttgtgtgactgttcacagttcacacagttgttcgtttaactctttattacctgaattttgcaacattttcttctctctgcattattaagtagtggccttaataaaacccaagtccagacgtgttggttggctcctacacctgtgtcaaggagaacttgacgtctgatacattaatgggccttcagcacttctaagccagaaagccaacatcccagacacaggaattttcacctaagaacttgaaagctctaacaaactgcgaatgattagttagggttatattcaacatttagtcattatttctaatgttctaaaaagagatactgcttaactaaatgatcttattccacatagagtaggaaggtttggtgattttgatatatcactaggttagaaaaaaaacctttatacatagacacacgtacacatttttgaccttgtaacatttaattctggaaagtctatcttaatgaaaacatcctaaatatagagaaaaattttatgtagaaagatagtcttttttttgtagccacaaataaatggagatagccaggttgggcatggtggcttatgcctgtaatcccagctctttgggaggctgaggccaggagttcaagactggcctgtgcaacatagcaagaccccatctctacaagaaaaatgaaaattatccaggcatgatggcacacacctgtagtcccagctacttatgtggctaaagcaggaagatcacttgagctcaggagttcgaggctacggtgagctaggattgcaccactgcactatccagcctgggtgacagagcaagacgctgtctctgaaaagtaaaataataaaataaaaggagatagccagcaataggagaatagaatataatccagctatttagaatgtttccataattgatgaagaagtccataccttataacacgtgtgaaaaatatatagaaatatacacacattgtgtttgcagctgtgtaaaaaatacatagaaaaagtctaaaaggggctgggcacagtggctcactcctgtaatcccagcactttgggaggctgaggcagacagatcacttgaggtcaggagtttgagaccagcctggtcaacatggtgaaaccccatctctactaaaaataccaaaaattagctgggcatggtggtgcacgcctgtaatcccagctactcgggagactgagg[133 bp omitted]atgattttttttcttactttgccttattttctaatgagtgtatattagcttttttatatttgaaaataaagtaaactttagaaagaaaaactatgcagtaagatactataagttattctaagatgatattttctataagtcattttgaaagaattatgcttttgaattgtggaagaattatttctgcttaagtttagaaatgagccagaagcggccaggcgtggtggctcacgcctgtaatctcagcactttcggaagccgaggtgggtggatcacctgagatcaggagatcgagaccatcgtggccaacacggtaaaaccctgtctctactaaaaatacaaaaattagctgggtgtggtggcatgtacctgtagtcccagctacttggaaggctgaggcaggagaatcatttgaacttgggaggcggaggttgcagtttgctgagatcgcatcactgcactccagcctagtgacagagtgagatttcgtctgtctcaaaaaaaaaaaaaaaaagaaagaaagaaatgagccagaagctttatgaaactgtacttgcctctgtttgaaaactgaaaggacaaacatgaattagtttttgatacttttggaatacatgtgagaccacattattctctattcaggttaagcaatgataagcgtgccctccattttaaatgctttctcttttataaatagagcctggtagtgcagcctttaaatgcaggtggtacaggtgtaaaatagttctgtaagtaactttccatgtctaaaagtgtcttaaacagctactgtgacattgatggagccatcgaaatatattttataagttaatagttaccttaagttttaaactagctgtatcttgaacatgtatctatattgatcttgaaatgcaaaagaaaactaagcaataaggtcagtcagaatatattatttcatgtgtcttaaaacacaagggagaccagcctgtagttccagcagttagagaggccaaggtggaaggattgcttgagctcaggagttcaagaccagcctggacaacatagtgagacttcatctctatcaacaaacaaacaaacaagaaaccacatatctgtgaaacagatatctatatttgaagactatctatgagaaatcattttgattgattttaatatgattatagctagcttaaatcctaattcttttttcctcctaagttaaaaaataaatgtaaaaatgtaaaaataagataaaaaatctccatcagtgcagatgcatgataatcacagggaggccaaagatgaagagaaacctctaatgcacctttacctacgctctgactttaaattctatgcatctgcattgacttggagttgtaaacttctgttactctcatcataggtccatggcggtctgtgagtttgggatgttggactcaattttttcacagatatatatttgtagtttttgataacccaaagttataatcatctgtaaacttcacgactaatcgttgttaacctcatttctgttgaatacttatggttactacgtgttgtcaggtactgcttatggtattggtttaaaggacttggtatttcagatgcaccaagaccagcctcatagggatgtttagagaatgtatataacagctttaggtttccttgtctggagtgggtgtgtgtgtgtgtttgttaacagagtacatacagatagattttttttttaagtttggcaatttgctatagaatacatttattttaaatatagaaaacatgagatccatcatatagggtggcaactcaatttatgtgtgggatgcataattgagagatgttattttgagtccctttttttgtgagctctgctgtgaactgcaaactgtgtgcatgtgtataaaaggttaagagcccggatagctgagtggggtgccatgctgttagcagacgatgagggcagtattactcaccaggtgcatgctgtcagctctgtagaagattccatcttcatggagtcatctcatggtccactttttcttgaagccaggtaacatttccaatgggttggcctcgttggagtttttccagcttgaaaaacctaagcattttcttctctgactttttttttaataaaatgctgcctgttggaaaaactaacttgcaagctggaatgaacctgtgatatcactttgctttgtaagaaataattatgtgaggagtgattttttttttttaaatagaaactggtgagggtgagaattggagtgttgtgtcttgctttgttgtgttaagcatggagcactctggcttgtgttgtagacttttgtttctagggatgtacagactattttgtgataactaatctgttctctttgactattactgaggcaaagtagttttgtgcagtttgaattcttggctcttaactcttttgcatatgtcagtgccttggtcttttaatgatatctgacttttgcttcaaatctgtttaacttagttataaaataacctaaactagacagtctctctaagctcttaattttgtaagttttcttttctttctttttttttttttttgcgatagagtctcactctgtcacccaggctggagtgcagtggcaccgtgtcggctcactgcaaactccgtcttctaggttcaagcaattctcctgcctcagcctcccaagtagctgggattacaggcacccaccaccatgcccggccactttttatatttttagtagagacggggtttcaccatgttggccaggccagtctcgaactcctgacctcaggtgatccacccgcctcagcctccgaagtgctgggattacaggcatgagccactgcacccggccaattttttaagttttctacatcatctcaattgtgttcacttagtaactaagacttcagtgacatttaaataaaatgttctgaccttttctttagagctttatcctcttcatggtaagctgtcatacttgagactcttgagggtacttactgagcatgctcacaactcagtttgtggtacaggctgtccctgttcttgtcatgcatactatggcttattttatgtcattgcctttcaatccatcacattacgttatgtctgttagttggtatcattatcactgcctgtctaacaccagggattggtttttttctctttaattagcagtaaccaaattaatgcaaactgataaatcttcccctcccccttcgggttttttggggggttttttgtaaatttttatgaggctcagtgtttccaaagttgactttaatcatttctcttagaaaagtattgtcacttgtcacttaactgcttacaaaatagctttcagttcctggggataggagattgcacattatttaaccatgaatatgatcctcaaaattgtgggaacaccgccttaattttcattttgaacaaccgtaacggtattataaaatgctagattgatttgtctaacttctttatttcctgtgtgaaaaaaagtttacaaatttagatgtctactcccacaaagtagctaattgtctttattagtatctacattgtgtcattttcttaaagtaatgattaagtaattatatatatggctatattgatcaatgtttttgataagcattactgtatgcagttagcttgacaagtgtgctaatacttccctaaaagtagactgctaaataactggtatagggttttcatactaatcatgttttaaataataattatattttctgactgcaggcacgtgacacaagctgacctcaagagctccacgttttggcttcgagcaagttttggtgctactgtttttgcagttttgggctttgctatgtacaaagcattattgaaacagcgatgatataaaaagaaatactgtccctaccaaaaacaaatacttttatgtacattctgaatgctttaagttctgctagaattattgagatatttatacatgcagagttactttattaatatttgtaattcatgcataagagtattttaatgatagttataactgcagtattggctagcatatggaaagaaaacagctaacagccaaactaaaatggctaaattccagaggccaaaagggaatattttgtaaatatatgtacatattcaggcaagatatggtctcccaagctgagttctagaaatgatgtttctagacatttctaagtggtattgttagtgctcacttggctcactcttctaggtttaagttagcccagagattgtatttactcatggatcactttatttatttcacatttactcagaatgatcctttgggttctataaggacataaggtacaatttgccattgtctctccatttttaaaaacatacaagtcagtgtcagcttaccaacatgacattttttcagtcagttgtggtaggccagccttgaagccatcgcacagtctagaaacttgtgtagctgagtgtgcagctcacctttaagggtgaagttaggtaaaagcaattagcagaggcgttatctatgtgattatgttgcttccttgtcagtatgttgaattttatagccctttcaatgaaataaaaaaaaaatttgtatattaccaatgtttttagtttaaataaagagtcacccttactactgttgaatttcatcccaagtgtaaatcattctataatggctgtgtctgttatagtatattacagtaactgcatgtgtcaccaagtgttctatatcaggctaggataacctagaggcagtaattttttaaatgataaaataaatctaatgaatataaactctcatgataaacctattttttccatcatcagccttttcaagtatttaaataaataactgctgtgtactgtgatcttgagttcttttgtcatctaaagtaaatatttctgtacagatgtgagtgaagtcctctggtttctatctctcatattgaaaattattctgtataaaaggaatactcagccgggagtggtggctcaatcgtgtaatcccagcactttgggaggccgaggtgggtggatcacctgaggtcaggagtttgagaccagcctgaccaacatggtgaaaccctgtctctactaaataaaaaaaattagctgggcatggtggcgcatgcctgtaatcccagctacttgggaggctgaggcaggagaatcgtttgaacctgggaggaggtggagattgcagtgagccaagatcacgccattgcactccagcctgggcaacaagagtgaaagtatacctcaaaaaaaaaaaaaaaaaaaacttattaggaaaaaagtcaagtatgatttatatatgtaagaggaaatttatttaaaagttgtagagaaatctattctggtaaaaggccaattgttttccctacacatagctaattaatgtggtttctgctattgtttgcatgtttattttctcctttaacatgatttttcctctttgccattctgagggacattttcttacaagatcacacttcttgagcaactagtaacagtatagcttactagctggcaaaataacatgacacttcatttgttatttgttattttttgataaggtcttactctgttgctcaggctagagtgcagtggcgcgatcatagctcactgcatccttgaattcctgggctcaagtgatctttccatctcagcctcccacagtgctgggattacaggtgtgagccaccacacccggcctgactcctcattttttattattttctgagaatttcccacttaccaaatttatgtcagttgtatagtttgcaatgacagttaattttttccaagttcttttctagtttgtctgaaatactgctttaaatgaatatgctttatagattgttgtgtttgtgagaagcagaggtaagaagctagcttaccaagagttaataagtggtgtgtttatatatttagatattctctctccatcttttcatttggggagcttacatttctttggttcagaagaaggcagggggcagctgccctatcttgcacttgctctggacacacccccttgctaagctagcccctttcctcacttgtcaatcactccaggtggggcgaattagtagagggaatgcttactgttttctcatctttaacctacaggcacatatgggttttttctttcttttggagacagagtcttgctctgttgccagggctggaatgcaggggcgtaatcacagctcactgcaaccttgaccttgtgtgctcaagcaatccaccctcctcagcctccaagtagccggggctacaggcatgtgccaccacacctggctaattttttaaaaaattttttagtagagatgaggtctcactctgttgcacaggctggtctcaaactccagagctcaagtgatccttctgcctgggattataggtatgagctgggattataagtatgagccaccaggcctggcctatttttcttcattttgcatccactttagagactagtgaatgtgagaaaataatgtgaacacaagaaaaggctttttctggcttttacagtttactcaggagatgcaagctttaagagtactaaggagaaataaagaaaataggaacttgagagtcgaaaggagatctttcactttacaccagttggattgtcttttttttttttcttttgagacagagtcttgctctgttacccaggctagagtgcagtggcacaatcatggctcattgcaacctcagcctcccgagtagctgggactacaggcgcccaccaccatgcccggctaattttttttttttttttttttttttttttagtagagacggggtttcaccatgttggccaggctggtctcaaactcctgacctcaggtgatccgcctgcctcagcttcccaaagcattgtcttttattttttatttttattttttcaacatctaagtatttattaaggtgagtttttacaaacaagcatctatcccagtgtgcggggtgaggatgggagaggagagtggggcagcaggaagatgaggattctcatcttttgataataaagctccaggttcatcccattgtggatttcatagtcccccagagacacatggtccttaaaaattgtgtaccacttcttcaggacaatcttgttccaacgggtgccagtttaggctgcaatcagcttcttaaggtccccgatggtatcatccgtgttgcatttaacgtggacctttttccccagacggtcgttgcaaacaacctcgatcatcctagctggagctcgaattgccttgcatcctagctagagctcaaatcgcctggaatctgtgaggccactagctcctcagcattgtctttcaaatgggcaattctgaggctgcagtgccttaatgaataataaggcagttgtgtgaagaagcattgctttgaaggtttgtagtcctagcataatgtagtaactatatcagggatctgttgcttcttgctattcatgtctttctctttcacatttgaccaaaaaatgagcaatttctcgcattgttggcactgataatgctacggtaggagtgggctctgatattaggaatttggggagcacatgaccattctgaaatggcctatgaaagtggtaggaggactttgggtatcagtgcatatatgcacatcatctgccaggggaaggcaccaaagaagaaatatactgatgaggctgggcacagtggctcatgcctgtaatcccagcactttaggagacgaaggcgggcggatcatttgaggtcaggagtttgagaccagcctgaccaacacggtgaaacgctgtctctactaaaaatacaaaaaaaaaaaaaaaaaaaaaaaaagccgggcctggtggcacatgcctataatctcggctacccaggaggctgaggcaggagaattccttgaactcaggagctggaggtttcagtgagctgagatcacaccactgcactccagcctgggcaagagtgagaccctgtctcaaaaaaaaaaaaaaaaaaaaaaagaactatactgatgagccagtcttgaatgaaatgagaactttcccaatctatgaaggcagctgaataatgaataaagagagggaagcagatgtaagtgcccgatctctgtggtagagcataattctttcctaaacaggccctcaaaatgcacctggggttggctttttttttttttgcctatcattggctgttaggttagttttgatgccccttttgtctgaattgcactagtaaaagtcagtacaaagatgcctttaaaatatatgtgcaaatcctaaaaataagtgtgtaatctagttccattaacatgtttatttgacttcatactttaatatatcttattttttatttatttttttaaccaacataccagattcctaaatcatactttcacagtccacgtgtttttaggaaactgatttgggactagatactttttgagaaataccacgtcaagatgctaaatttaatgttcacagtatgagaatgacccatgcaggcagcttgacctttccaatgcctttatccccagatctacagtccaataacacacttatttaaacccctaaggttgcaagtaattcatgtctttttaactctttttatcaaacattgctgtcagtgagagcgagtgtctgttaacctgcttggccctcagctctgtggaagtctgacctgtgagtatcacagctgtgtatctcaggtttctctagtgcatctcagtttcataaaatatcctcttgctcccatggcactcagacttgtcagaccatttgtcccagatattttgggttcagaaagtatcttactagaaggcaagattttattttatttgagacagagtctcccaacggtgccactcggctcactgaaacctctgcctcccggcttcatgtgattctcctgcctcagcctcctgagtagctgggattacaggcatgtgccaccatgcccagctaatttttgttaccacgcccggccaattttatcttctttagcatagacagttgcagaggtccaatggcgaaatcgagagattgttagtccttctgggtttgaaagctgaatgtcagctgtgtacacacaaggaggaattgccagtatcgttttcatacattgaaaattccaaattccgcaagaacagtgtgtttctctttcagcattttcctatttatagtttacatataagtgttttttatttttttgagacggagtttcgctcttgttgcccaggctggagtgcaatggcgccatctcagctcaccgcaacctccacctcccaggttcaaatgattctcctgcctcagcctcccgagtagctggaattacaggtgcctgccaccatgcccagctaatttttgtatttttagtagagatgcggtttcaccatgttggccaggctggtctcgaactcctgacctcaggtgatctgcccacctcggcttcccaaagtgctgggattgattacaggcgggagccaccgtgcccggcccatataagtgtattataatcaacccttaggagttttattaggatgacatgaatgtgtatactgcagtttaagttataagtcgcaaactttttctgcaaagggccagatagtaaatatttgagactttcacaactactcaactctgttgtagcatgaaaacagtcatagacaatacataagcaaatgaattacttcattctaatgaaactttatttatggacacagaaatgtgagttttgtatcatttttatgtaccagaaaatattcttattttgattttcttaaccatctaaaaatgtggaaactagccaggcgcggtggctcacacctgtaatcccagcactttgggaggctgaggcgggcacctgaggtcaagagtttgagaccagccggtccaacatgatgaaaccccttctctactaaaaatacaaaaattagccagacgtggtggggcatgcctgtaatcccagctactcgggagcctgaggcaggagaatcacttgactccaggaggcagaggttgcagttagcccagatcacaccattgcactccagcctgggtgacagagcaagactccatctcaaaaaaaaaaagtggaaaccattcacatgctgtacagaaactgacagtgagccagatttgataaacgccccctgtaacggatgaaaatatagtagtaaatgcacagcagcatttactaatgatttaaaaaaattacctgattgttttggaatgtgaaaagtttcaatactatgaagaacttaaaaatactgtagtcatgttttgtttgtatgaaaactaagagtggatgtaggagttgtttgatttttttcacttttactgatcatattgtttataagagcacggtgcgccggccaacgtggggttaacctcaaagagcagtttgatgcttagaaggtaaagggagcatcaattccacttcttctgaggactcacgtggaactgttcttttggcactttatctatgcttgttttcagttttccagttgtataattggtatacatggaaagtaaaggaatcccacgagaatgtttagtttgaactctagttatctggggaatttacccccttgtgtgcatgaacatgtgatcatgcttcttatttctttaaattttaaagccaaaatttcagagcttagatagcttacatagtataaaggtcatctgtccaactccatacttt[182 bp omitted]gtggcaggtgcctgtagtcccagctactctggaggctgaggcaggagaattgcttgaacccaggaggcggaggttgcagtgtgcctaaatcgctgaactccagcctgggtgacagcaagaagtgacttactcaaagccacagtattagtttgtcctcgagctaggactggaacctaggtatcttgattcccagtttggtactccttccactgtaggagccaacctaacgactgggcttttgttcctacctttggtagatttgcaatatagtctgtgaaaaacaataacaacaacaaaaaaacaggcctaaggggaaaaagagaaagaaagaaaaaccccgctaaacagttttgacatctctataactaaaaagggttaaagttggcaaagcaaattttctggaagcctttcatttcctctgaggcattctgccttcatttctgctagctgtcactaggtaattgatgtgtctattgagaggagtgcagacacgtggttaggtttatttcaggtacagataactgaggagaagtaaggatataactactctttgaaaagcactctatgatttttaattgttcttaagttgttaattttgaaaaaatactcttaaaatttattcacattttataaatggaaaagtacttgtgtcaggggctttgatgggggagaactcctagaataaagttttgtcactaacatttttcatctctgcttctgtaatctgcctccaggatttctataattccagtggcatccagccacttctatataccatctagagaatgagtggctgaatatgtcttcacacattcaccacactttttactgacttcctcttacatcttttttttcttttcttttttttttttttttgaaatggagtctcactcttgtcgcccaggctggagtgcaatgtcacgatctcagctcactgcaacctccacctcctgggttcaagtgattctcctgcctc[134 bp omitted]tgacctcccaaaagtgctgggattacaggcgtgaaccaccgcgcccagcccctcttacatctcttacttttcccccagattctcaaagtgtgatcacatcacctgggaatttgtaagaaatacgattttcaatagcccttcccccacccccaccccagacctccaagactctgaggcctcagaaacttggaggatgggacccagcaaaatctgtgttaacaaccatcaccactacccaccccctaccctgccctgcgattcagatgcacgtgaaggtttgagaactgctgcagtagatattgaaggagtcaaagaggttacaatctttgggggcaacaaaactataaatttgctagcagtacagtggttaaaatttttaagagaaattatacatacgaataattttggtaaaacaatagaacaaccccttctatgtctccctctttcccctaggaaaattccaattcaaatctcaaggccctgcagacccagacccagacctttgcagccaaatctgcactctccctatcctactacagtctaaccacagagaacttccttcagttctaagaatgtaccttgctcattctcttgagccctttgcagatgctttctctctagaagcctgtcctcccagctcttcatcctttaggtctcaaggagggccaaggcctggctgtcagcatccaggagctgagccttggcatttagtgctcatctatccacttcatccccctgtgcacagtatggcacccctgccctcacctgtgctttgtccagtgatcctctcttggccctctctagagattccattaaagagtgttaagcaggggagggatatactagtcaggtctcagcaaatgtccttttccctgaccccaaggaactgaacctggggaagctaacctgtctccatcctacccagtactgaactaagtactggacctttgcacctgcctgtcatgcacttgcctactcttagagtacctagggggatgtataccaatccgtttatttgtaatttcattttttttttttttgagatggagtcttgctgtattggcaggctggagtgcagtggcacaatctcggctcactgcaacctctgcctcccggattcaagcctttctcctgcttcaggctcccaagtagctgggactacaggtgtatgccaccacacctgggtaatttttgtatttttagtagagatggggttt[152 bp omitted]actcagtcactgagtccatgtggaaagaactgactagcagccctggaagctaaatgatctcttagtggtagtggaaattcactagattatgggttggggagtagtaaaggattgagttaagagctaagatctgagtttaaatcccaactttgccacattctatgtgcaagttacttgaactttctatttccctcctaaacaatgaagattgggattgtgcacatttactgagatctgttcctggggggtgttatttccccttccccttgtcaggagaataggaggtctgcatcccatataaagacccacaggatggcaaccctctgcccttcctcctgcacttgagcagagctgcaccactgtgtctggagagtgggagaggcatgggtggcagccagttttttctcctatatgtatctgagaaatgtcttgcttctcttgagtattggagctgtcttagcctattcaggctgccataacaatgtaacaaaataccataaactgggcagcttataaacaacactaatttatttctcacagttctggaggctgggaggtccaagattaaggtaccagaagatgcagtgtcttgtgagggctcgattcctggttcatagatgtcaccttctcactgtgtccttacatggtagaaggggcaaaaagttcccttgggcctattttataagggcaactaatcccattcatgagggctctaccctcatggcctaatcacctcccaaaaggcctcacctaatactgtcaccttggaggttaggatttcaacataagaaattggggtgggggggatatattcagaccatagcaggggccaataaaatgtccctcacccctattgtcttggcaggcagcacaaacagatgagtttccttatttcactggctcctttctcagtcttgtgggctgcccgacctctgctcaacctctaggatactcgagtaccccaaggttctgtcctgagtttccttatctttcttatctagactttgtctctaggtgatctcattcagcaccttgattttgattttttaacttttttttttgacagggtttcgctcttttgcctaggctggagtgcagtggctcaatctcggctcactgcaacctccacctcctgagttcaagccattctcccacctcctcctcctgagtagctgggattacagatgtgcaccaccataccaggctaactttcatatttttttgtagagacagggtttcgccacattgcccaggctggtctccaactcttgggcttgagcaatcagcccaccttagcctcccaaagttctgggattacaggcgtgagccatcgtgcctggccctgatttttaaactttttatgttgaaataatttgaaacattaaaaacaaagttacaaaagtaatcataggacttgctcctttggggtatttcttataaatggaatcgtacagcctgtggccttttgtgactggcttatttcacttagcataaagttttcaagactcatccgttttgtagcatataccagtactttactcctttttactgctgaataatattccattgtatggatatgtcatattttgtttatccattcttcagttgatggacattgggattatttctaattttttactgttatgaataatgctgctatgaacatttgtgcacaagttggttttttcattttcattttgtgttttgtttttctgtgtacaagttttggtgtggatgtatattttcatttccctagggtatatacctgggaatggaatggctgggtcattgagtaactctgtgtttaatattttgaggaaaagccaaactgttttccaaagtggccgcacatttcacattttcaccagcaatatgtgagggttctagttcctccacttcctcaccaacacttacctgtcttggtttttgtaactatttaatagtgaatgtgaaatggtgtcgctgtggttttgacaattgttgatcttgcccagaacatttattactgcagtatttcccaattttctacttcagttattccccctgtatttattaattggagttatacagtaaaggagaagagtgtccgtcccccattgacttatttatttatttgatatttatttatatgatggatatttactatttactttatcctatgggtcataacacattactcttttcttttttttctttttttttttttttttttgagatggagtttcactctgtcacccaggcaggagtgcagtggcgtgatctcggctcactgcaacctctgcctcccgggttcaagcgattctcctgcctcagcctcctgagtagctgggactacaggcatgtgccaccacgcccagctaatttttatatttttagtagagacgaggttt[141 bp omitted]gttttgctcatcctgttcttatcctagattgggccatcaggagctccttcaagctggcccctgcacccgtcaacatgtgccccattatttctgagcacttccttatttctaggcatcacaagatgttccaagcaacttgtttacttcccatcctcatcctgtactttacttgcccttgtcccaacatcaaccatttctccaggaactctggttcctttgattagagaatggttatttagaaacaaagattctggcattaggtgtagctcgttgctactagcagcccctggactttaaatacaatccagctgcaactcctaaattgctatcaccagccctgtcctgattccagaaatctacactctgcttctagtttattatttttttcttttctttctttcttttttttttttttttgagacataatcttgctctgtcacccaggctagagtgcaatggcgcgatctcggctcactgtaacctccacctcccgggttcaagcaattctcctgtctcagcctcccaagtagctgggattacagacgcccgctaccacgtccagctaattttttgtatttttagtagagatggagttttgccatgttggccaggctagtctcaaactcttgaccttaggtgatccgcctgcctcagcttcccaaagtactgggattacaggcgtgagccaccgcccccagccaactgattctagtttcttgcctgttgtttcttcatggatatctgaagcaccttaaacagaacccttcgtacccagcagtaactgcccctttcccgatcgtccctgtcctgttgactctacttccaatacatgtatctgtctacttatctccatctccactcctaccacccagggccagcccatcacgacttcccacctggaataaatgcaggataacctcctaatggctgcagcagtttcccagtttcttcttttccttccaaaatccattctctttaagcagccatcttgccacccctacacttaaattctttcattatcttcctgtcacacttaaataaaacccagtttccttgtc[134 bp omitted]tcctgcctc[136 bp omitted]cctcccaaagtgctgggattgcaggtgtgagccaccacgccttgcccttgtcctgctttttaaaaccggactgcgctgttccttgcctgcttctctgaactcactgtttccagacctattgcctgcttccttcagagcctttgcactggctattctctgcttgaaacactcttccctctttttttaaaaagctgcctcatgcttgtcacttaatctcagtttaaatgttacctcctcaaagtggagcctttccagattgtgtaaagaaaccatctggaaactcaatgtgacagtcgagtgtggtggttcacacctgtaatcccagcactttgggaggctgaggtaggtggatcacttgaggccaggagttcgagaccagcctgaccaacatggtgaaaccctgtctctactaaaaatacaaaaattagctgggcatggtggcgggtgcctgtaatcccagccactcgggaggctgaagcaggagaatcacttgaacccaggcggcagaggttgcagtgagctgagatcacaccacctactccagcctgggcgacaaagcgagactctgtctcaaaacaaacaaacaaaaactctatctgacatcaccttgattgtcagcatctcaccaccagccatcctccctccctccctccctttcatcctatctcgttacctcccttccatcctccctccctccctctctcattccctccctccctcccttccatcctccctccctctctcgttccctctctccctccctccctctctctttccctctccctccctccctcccatcctctctccctcccttactcccttccttcctccctccctcccttccatcctccctccctccttctctcgttccctctctccctcccttccttccttttccatgtgtgctccttcatttgttgagggtctc[137 bp omitted]catggagaaaccccgtctctaataaaaatacaaaattagccaggcatggtggtgcatgcctgtaatcccagctactcgggaggctgaggcaggagaattgcttgaacctggaggcggaggttatggtgagccgagatcgtgccgttgcgctctggcctgggcaataagagcaaaactccatctcaaaaaataaaaaatgaaaataaaaaaaagagtaggtctatgactgtcttaatcaccactttatattcagggcctagaacaatacttggtacatagtcgatgctcagtaaatatgttttgaatcaatgagtaaatggacaaataaatgaactttaagccatttgccttaaaactctatgaaagtcagtgcagcttattggactgagtgaggaaataaagctaaaggacaaccaaaatatttcctgcagagctggctccaacaactgagctgtggggaagtgcgtccacaaaatcaatgacacaatgtcagggacttgcacaattcagagccaggggtcacaggcctcagacttggggtctgagcctttcttcaagtcgtctggtcaactaggcctcttggccagggctcagtgatctctcttctactgctacacttagtttatcacaagggattctgttctgcttggtcattctttccttcagaaacatgtacttggagcctcctttgtataaagtgctgggctgtatgtggtgagaaatagagatgaaatagttatgggggagatgcctgattcaaagatcttccaatacaatagggagaggtaatatgtaaataagcatctactataggtagaaaaataagacctataagagataaaatcaagtgcaggccaggcgcggtggctcacgcctgtaatccctgcacctttggaggccgaggcaggtggatcacctgaggtctggagttcaagaccagcctggccaacatggtgaaaccccatctcgacaaaaatacaaaaattagccgggcatgatggcagatgcctgtaatcccagctactcgggaggctgaggaggcaggagaatcgcttgaacctgggaggtggaggttgcagtgagtcgagatcgcgccattgctctacagcctgggcgaaagagcgagactccatctcaaaaaaaaaaaaaaaaaaaaacaaatgcaatgggaattcaagcagaggggagattttctgctgttgaggagctcccagaaagcttttatggaggaggtggtgttcaccttgccccataacaattcatacataaagaatatttagttagtttcatttggcctgaaagaattcaggtacctgtgtgcctcacgcttctggggctggagatcagtaatcacttcactggataaatttcctccagtttggtatgtaaaaattgagacacatactttctataaaaactgtcaaagtacagctgaatttgaaaaaatatgctgtgtaataatgtgcttggaacagaataggtgttcatttcaagcagcatgaacgctgtgctcacctgttatgtgtaagtggcagctgaaacatgtaccagattataactctgccaccagccaggtgcagctgtagcatcttacattgtcatcaggattcttccacattttaggatccacgttttgggagtgagagttactgtttgccaaaaatgacctcccaagcccaaatgaagaggacctactagcgcagcagtcagcgagaaagaattgggagatgcctgtcactggcagagagagccttccttatgtggtcaggaccatggaaagcccaaagccaagggacctgggaagtcagccaaggacgcttgcctgggtgtctcctggctggtttctctgtgctgtggagccacctatgtttagaacctcttgccgcgctccctctgctgagcttatatttatgctagatcaaatgtttaaactgcttttctctttgtggatcacaaattttagaacagaaaatgcgggttccggagggtgtgagagacagggacaaccatatgtattgcttcagtagatgcttcagagaaagaagacacttagttctctagttgttcacccaacccaatacggtttctgctccttaagctacattcctataaagattagctttcagctgctaccaccaagaaacagttcaagtgctgcttatgttgtattttaactaaagatctcaagaacaaaaagaaatccctagatgctgacattccaagcaaacttaggtcaggggtggaggcggggaattgacagataaagatttcggtgagcaggcagttctcaccttaggtgagttcacagtgtgcaggggtgcttggtgggatggtatccatttctttcatctttgagagatttaaggggtgcttacaataaggggatacccaatctgcctatcctgacacattcaacacgagttcttaaattctcagctaatgggttggattcccattcattttataggcaggatggctctatttggatgacccttctcaaaaagtaaaaacaacaaaggcaaataaatccttccgagagagagtatgaggctatggcagacaaggtaaaatgcctgtcacaggagataaattattttgctcattaacaagtcatttgtcctttgatttctcaaagccctagagaaacaggagctcagctgacaatgacctgaggggacccctacagtgcttcaaacagtggatggaggaggagatgccttcctggttaagaaattatccctgagcccttgtagaggacagtccagcacaggaaattctggaactacaagatgaaaatgtgtgccagcatgcttctactttcagggtacagtctgaggccctagggaggaggagttcctcaagtgctttgacctcttgccaggacaaagacggagaagtatttagaagcatctgaatttgttagctcttcagttttcctcctccactccctaccctgcacacagagcctcagaaggacagaccagcttcacccccttaccagcaattactgaagaatcacaccccacccacctcaggatcactgatctccttcctatatgggaaccctgacccttggagaaaaaccgctgacctacaaactccccacattcacctagagagcaccagagcagagttctgagtgagataagcagtcctttagggggatctgtttttccagctctcatttttccccccttatttcctttatctctagaattctaagagctgtactgttcattgtttctacccatcattattaagggagagatatggaaacattcccatggtaacagtttcatctcaaaatatctgaatgctattagctgcctttccactccagggaaaagatgagatttttttttaaaaaaagaaatctttattctcaggatatagttgacaggtcctctccacactgcagggaggcctgcccagatcagtggagatgggaaagggctcataaagccaaatttgtttcttagctgacttcacttcctgaacatttcaaaaacttattattacatggttctgacaccgacccagagaattgctggtggaagtactgatgaaaacaccaacatctctgggggaagtcatcaactgggagcatatgagatgggccagcacagacttggctcaaagacccacagaccacactgtgttactggagagcaacaggtttgaacaaactcagaggtatgcgctggttgccatcagaaagctggggagagaaaatgggataggaagcgttgtacctcatgttcatgacacgctttatggctggccaagggcttttcctattgaaatgggatgatggaggagataggacacatttatcttaaacatgcatcttaattatctattgctggcggggtgtggtggctcacacctggaatcccagcactttgggaggccaaagcgggtggatcacttgagcccaggagttcgagaccagcctgagcaacatggtctctatccatctctacaaaaagttaaaaaattagccgggtatgggactgcacgcctgtagtcccagctactcagggggctgaggtgagaggatctcatgagctgaggaagcagaggttgcagtgagttgagattgtgccactgctctctagcctgagtgacacagcaagaccctatctcaaaaaaatatattttatatatataatatatataatattatgatatatattatataaaaattatatatataatatataatatatgatatatcatatatgatatatgatatatcatatatcatatatatcatatatcatatatatagctgcatgacaaattattccaaaacttggcagcttaaaataaacatgttatctcacagtctctgtgggtcaggaatttgggagcaatttagctgggtgattctggctccaggtcactaattagattgtattcagactgtcaaccagggctgcagtcacctgaaggcttgactggggctgggagatccctttccaagatagcacattagccattggcaggaggcctcagctcctcaccacatgggcctctcttcacagcgctgcttgaatgacatggcagttggctgaccctggagcaagtgacccaagacatagaaaacaggaggaagctgcactgtcttgtttgacctagtctcagagggcacacatcattgcttctgccatattctgttctatagaagcatgtcactaagtccagcacacatgtttggggaggggaatcgagccacctcttgaaaggagaagtatcaaggactctgtgaacatgttttaggactatgatgtcatggcagttatgaaaactaatgtgtcagtgctgtatgtactgatatgaagcaatctccaagatgtatcttcagtgacaacagcatgatgcagaacgctag[140 bp omitted]agtgaaaccccgtctctactaaagaaacacaaaaaattagccagatgtggtggcgggcacctgtagtcccagctacttgggaggctgaggcaggagaatggcctgaacccgggaggtggagcttgcggtgagccaagatcgcaacactgcactccggcctgggcaacagagcgagactctgtctcaaaaataaataaattaattaattaattaataaaaaagggaggagggataaatatgcagttatgcatagactacctctcagaggacatacaataaactggcctcaaggaggagggctggggacaggtgggagagagatttgttttctgtaccttttggattttatttgagcaagtattactctttgataataaaatttaatttcaaaaatagattaaaataacatagaaataaataacattgttgaaagaacttagaatgaccagtttgagatggaatttttttttttttgaggtggggtttcactcttgcccagcagggagtacagtgacacgatcatagttcactgcagcctcgccctctcaggctcaagcactcctcccacctcagcctcccaagaagctgggactacaggcacatgccaccacacctgacgaattttaaaaaatttttagaagaggtgaggtcttgctagattgcccaggctcaaattcctgagttaaagcagtcctcctgcctcagcctcccaaagtgctgggattacaggcataagccattgtgcacctggttggaattcactttttaaagctattggggccagcagtgagctatgattgtgcctgggtgacagagcaagaccctgtcttgaggaaaagaaaagaataaaactatcagggtagatgattttaggggattggtttgcttgctttcttgcttgttttcttggaagcaagtgtactttcttggcaggcatgttttgagacaggaggctataagcaagatgttgaaggaaaacagaccaagctctctgaaggagagcacttggaagagaatctcgtccagttctcatcccgtgcatgcccacctacctggacttgcacatatctgctatattttcccttctgtgactacagagaaactgtccacaggcagctccttcacttacgcattagagtctggcctctgtcgtctgcatcctccagcaattccccctgcctttcttggatctttgatttgtgttcctctggatttattaacaaacaaacaaacaaacattacttctcccatctgaaaaaaaaaatctcttcgtccgcatttctctgttccctttatagcttgcttgaaagagtttcctcagtgtctcctattctgtctcttttcagaacctgagatatagctcacactccataaaattcacctttttagcatgtacaattcagtggtttttagtacagtcacaaacttgtgcaaccgtcaccactatctcatttcatcactcccgaaagaaactctgtacccattagcagtcactccccaatcctcctttctccgaacccctggtaatcactaatctactttctgtctctacggatttgcctcttctaaatattttatatcaatggaatcatacaatatgtggatctttgtgactagctcctttcagattgcataacgttttcaaggttcatctgtatgaaccttgtatcagcatgtatcagcattccattccttttcatggatgagtaatgtttcattgtatggaaatatc[133 bp omitted]tggcaaaaccctgtctctactaaaaatacaaaattagccaggtgtggtggtgcatgcttgtgattctagctactggggaagctgaggcatgagaatcacttggacccaggaggtggaggttgcagtgagccgagatcacctgggcaacagaacaagactctgtctcaaaaaaaaaaaaattatggatattttgggttgtttccgccttttcattattatcaataatgctgctacaaacattcatatacaagtttttgtatgggcatatgttttcaattttcttttctttttttatgacagggtttcactctgttgcccaggctgcagtacagtggcatgatctcggctcactgcaacctctgcctcccaggctcacacgatccttccagttcagcctccccagtaactgggaccacaggcacaggccaccacacccagcttttttattctttctttctttctttcttttttgcagttttgctcttgttacccaggctggagtgcaatggtgcaatctcggctcatcgcaacctccacctcccaggttcaagcgattctcctgcctcagcctcccaagtagctgggattacaggcatgtgccaccatgcctggctaagtttttttgtatttttagtagagacagggtttctccatgttggtcaggctggtcttgaactcccgacctcaggtgatcagcccgcctcagcctcccaaagtgccaggattacaggtgtgaaccactgtgcccggctagtctttctttcttttccttttttttttttttttttgtttttttttttttggcggaaacacagtcttgccatgttgcccaggctgatctccaactcctgggctcaagcgatcctccctccttggtctcccaaagtgctgggattaggcgtgagccaccacaccaggcctcggattttctatacataagatcatgtcatctgcaattagagatagatttattccttcctttccaaagtatatgtcttttatttatttttcttttttaattgcccggcctagaccccccagtacaatgttaagtacaaacgacaagagcagacatccttgttctgttcttgatcttagggggaaaacattcagccttttcagtagtaagttgtcggttagctgtggcttttctctctctctcttttttttttgagacagggtcttgctctgtcatccagcctggagtgcagtggtgtgatcttcgtttactgcaacctcctcctcctgggctcaagcaagcctcccagcccccaagtgtctgggatcacaggcacacaccaccacgcccggctaattctgtttttttttttttttttcttttcggagacgaagtcttgctgtgtcatccaggctacagtacagtggtgcaatctcggctcactgcaacctccccctcccgggttcaagcaattctcttgtctcagcctcccaaatagctgggattacaggcacgtgccaccatgcccagctaatttttgtatttttagtagagacagggt[131 bp omitted]tagacagggtttcaccatgttgcccaggctgagctgtgggtctttcatagatgtcttttatcagattaaaccaattctcttcctagtttgttgagtgttttatttataatgaagcaacattggattttatcaagtgctttttttcatttactgaaatgatcatttgttttttgtcctttattccattcatacagtgtgtgtattacattgatttttgtatgatgaaccaatcttgcatttctgggaaaatcccatttggtcatggtatatactcctttttatatattgttagattcagtttgcttgtattttgttgaggatgtttgcatctatagcataaggtgtatcattgtgtagttttctttttttttttttttttttttttgagacggagtctcgttctgtcgcccaggcgggagtgctgtggcgcgatctccgctcactgcaagctccgccttccgggttcacgccattctcctgcctc[224 bp omitted]aagtaacacttttctttttttttctgagatggagtctcactctatctcccaggctggagtgcagtggcgtgatcttggctcactgcaagctccacctccctggttcacaccattctcctgcctcagcctcctgagtagctgggactacaggcgcctgccaccacacccggctaatttttcgtatttttagtagagacagcgtttcactgtgttagccaggatggtctccatctcctgacctcgtgatccacctgcctcggcctcccaagatgctgggattacaggtgtgagccaccgtgcccggccccaagtaacacttttcatggtaatactggcctcacagaatgagttgggaagtgttctccccttttctattttttggaagaatttttgaagagattgatgttcctattctgtcttgagccactcctcccagcttgttacctcccctaccataccgaaactgctcttgtaaaggtctccaatgtcctccacattgccaaattcaacaatcagttctcagccatcgtcttaccactcagcaagagcatctgatctcagccatcgtcttaccctcagcaacagcatctgatctcagccattatcttaccctcagcaacagcatctgacacatttcctttctcctcggaacactgtctgcttctggcctccacaatctcctggttttctttctgcctcactggccactattttccgggcttctttgctggattgtcttcctctatcagatatcttaatggtgaagagacacagggctgagtccttgacaccttttttctgtcttttctcagattttttgtaattttatttctctcctaaatttaaacaccaactatatgctgaagcctcccaaatttagagcccaaatatggtctctctctttatctttagatttatatatcctctgcctattagacaccttaccttggatgctgaatgtatatctcaaacttaacatgtccaaaattaaacttttgatctattccaccaaaatctgctatgcccaccatcttccccatcattattaaccacaactttagcttttcagttgatcagtccaaaaatatccgagtcatccttattggatactttctttccctcactccctacagtcattctattagcaaatcctgttgggcctaccttcaagataatcagagagtggccacctctcaccaccgtcatgatccaattatctccctaatctttctctagctgggattgatggactaggcttctactggtctccctccttccccctttgcccaccttcaggctgttcctgggacagcaaccacctcagagtttctgtcataaataaatgttgaattttgtcagatgattttctgcatctattgagattatcgtatagttttccttcttcagtctgttaatatggtaaataacatagtttttggttctgttttgttttagatgggatccctgcctcccaggctggagtgcagtggtgcaatcatggctcactgcagccttgatctcggctcactgcagcctcgatcacccaggctaaagcaatcctcccacctcaatctcccaagtaactggtactatgggcgtgtgccacaacgcctagctgacattttagaaacaaaatctcattataaggtctcataatgttgcccaggctggtctcaaattcctgagctcaagcagtctccctgcctcagcctcccaaagtgctaggattacaggcatgaaccaccacgcccagccaacattgatttacaaatgttaaaccaacttgctgtgctgagattaaccccatttggtcacgatgtattatcctattcatatatgttagaggtgacttgccaacattttaagaatgtctgaacctatgttcatgagggatattggtctgaagttttcttttcttaaaatgtctcaagtgtttgttgagtgtataaatgagagcctgttggtccaaggggggtgggtgggagagtgtattaagaaggaaaaaaatagactgggtgcggtggctcacgcctgtaatcctagcactttgggaggctgaggcaagcggatcacctgaggtcgggagttcgagaccagcctgactgacatggagaaacccccgtctctactaaaaatacaaaattagccaggtgtggtggcgcatgtctgtaattccagctactcaggaggctgaggcaggagaatcgcttgaacctgggaggcggaggttgcgatgagcctagatcgcaccattgcactccagcctaggcaataagagtgaaactccatctcaaaaaaaaaaaagaagaagaagaaggaaaaaaaatagcacatttatagggctgtttccaaagcccttttcacataccatttaattgtcataaccaagaggtgtagatattactatcatgcccattataagagaactaagactcaaggagtttaaggaacctgtcccagacctagctaaccagaaggactgggacttgaacccatgccctctgtctgcagatgccatgttcgaggttagtacccagtgagtgaagacctttagggacaggcagaagggctcctttcagctttgattatgcttgtgaccatttcccaagggaaggagcagagcttctgccatgaacatgatacaagtaattccatgtttcttacttacagcatcttaagaaaactccagcatggcagaatgagcactccacctgcagatgcccaggagagcctgagacttatttttagccagaataggaaaatgccaaatatcttctaggagagttggcagctggagggctgctgatacagctgtgtttatataagctggtgcagaggggagaatggtggttgcaaaggaggcaggaggtgcttaatccacctatacacttgctgaggttttcttgggaagttctggtcaggagttactgctcaggagagagcgtcatgcagacagtctggagattgccaggagcataggtgcaactggcttccttgagtcagagcatttgtcaaagccgcccttaaatgacctgtccactggtcgttggcctcttcccaccctattatccaggggtaaataaaagaacagaagctctttcaaatggtgccattttatttattttttgagacagggtctctgtcacccaagctggagttcagtggcgccatcacggctcactgcagcctccatctcctgggctcaagcaatcttcctgcctcagcctcctgagtagctgggactagaggcccacgcccaccccccaccagctttttaaatttttttgtagaggtgaggtctccttatattgcccaagctggtctcgaacatcctaagctcaggcgatcctcccacttctgcctctcaaagtcctgggattatgggcatgagccactgcacctgaccctcaagttttaaagcatagaggttcacccgattctgaccatacttctcagatgtgcttggtgaaagcaatctataacaccccatcctacagaagctgtcaaatagttttctcacagaggcagcaaaataaggcttttaaaggtgttacctatgggctctcaaagagaattaaagtaaaacgtaccttagtaaggattttttaaaatattttttaaaatgttcaaataaaaacaaaagtagagtaaatagtataatgatctctcatgtacatgtacccaccactgaacttcaacacttactaacatggtcaatctgtttcattgttcccccacccattttggaattatgctgaacaaagcccagatagcccattatttcatctgaaaatacttcagtgtgtacctctaaagtataaagaatcttaaaacaaaacaaaacaaaaccacaataccatcttcacactttaaaaatgaactattggccaagcatgttggctcatgcctgtaatcctggcactttgggaggtgaaggtaggcagatcgcttaagttcaggagttcaagctcaggagttgcctggtcaacatggcaagaccccatgtcgacaaatacaaaaattagccaggcatggtggtgcaggcctgtagtgccagatacccagaaggctgaggtaggaggattgattgagcctgggatgtcgaggctgcagtgagacctgatggcaccattgcactccaaccttggcgacagaacaagaccctgtctcaaaaaaaccacaattccttaagatcaaatatacagtgtttggatcgccccaactctttaaacaagtctttttttttcacttgttttttttaagtcaggatcaaatatatattgctgacgaaaccaggtgatttgtcctgtagtttcctatggtatggattttcctgatcatatacctgtggtgtcattcaacatactcttctaaatatatttattcattaatgaccaatgtatttcctgtgaattggatctagagacttgaacagattcacgttcaattctgtagcaaaaatacttagggggtgctgtatacttccatcagaggcagcaaatatctggtttctttctgtgatgctagcctatcattatcgcctagacccgcaaattgactgacaattaattttaaggaacaaatgtggctgcaatggctttctgagtaatacgtgcagaaaaacacgtcctgtaaagtgtattgtttgtttgttttttgttttctaggcatgaaaacagccctggaagtctgccctggcgcctgcactgagactaatccaggtcactttagggaaactgcccagctctggcaccgcactgtgtgtctgtcagctctgtggggtgctatggcctcattttcccactagaggacactgtggctccaggacttcatgtggcgcccagccagtcttgctactccagcacctctaaggaggcaaagcctttagtgtgcatttattaggtaccaactgggtgctttctgtatcaagcagagaaataaaagaggtcaaacacaaggtcctgtggcattgtttcctgatgtagtttctttctttttctttttctttttttttgagatggagtcttggtcttgtcgcccaggcaggagtgcagtggcgccatctcagctcacagcaacaactgcctcctgggttcaagcgattatcgttactcagcctcccaagtggccgggattacaggcgcccgcgaccacacccggctgatattagtatttttagtagagacgggctttccgcatgttgcccaggctggtctcgaactccttacttcaggtgatccacccgcctcggcctctcaaagtgctgggattacaggcgtgatccaccacgtctagtcgtgtttcctgatgtagtttctttgcattattttattttatgtatttgtttattttttgagacaaggtcttactgtgttacccaggctggagtgccgtggtgcaaacacagctcactacagccttgaactcctgggctcagacaatccccccatctccaccttctgagtagctgggactacaggtgcctgccactgtgcccagctaatttttaaattttttatttgtcaggatggagtatcactatgttgcccaggctggtctcaaactcctgggctcaaatgatcctcccacctcagcctcccaaagtgctgggattacaggcatgtatttccctttagaaaacaacagaggtgcttctccatctgctggaaaccattttagcccctgctgtaggatggctgcctcctgcaaattcggttacctagttgtttttttttttttttttttttcagacagggtctcactctgtcgcccaaactggagtgcagtggtgcagtcttggctcattgcaacctgtgcctcccaggctcaagtgattctcctgcctcagcctcccgagtagctgggactacaggcgctcaccactacgcctggctaacttttgtatttgtagtagagacggggcttcaccacattggccaggctggtctcaaactcctgacctcaaactatccacgcgccttggcctcccaaagtgctgagattacaggcatgagccaccgcacccggccgttggatgttttttttttaactgcaatatttgggctttggggagtgtgaatatatccaagaaagatgccaaagtgtattcatctctgaaataatttattcatttattcaactccatgtattgagtatcctgggcggggaaggaatggggaacggatgcttactgagagctactctgtgccaagtactgtcccatcctttttacctacatcctcacaagatgggtaatattagcctcatttaaatccaaggaaactgaggctcattgaggttaaccagcctgctgaaagttatcctgccagatgcaaatggaagtctaaatggataaatatgtatgttttccaccaaatccctcaatgccacactgacaagcatggtactaggatgtagagaaagtaagatgattatagagacatcctttccttaaggaggtcatcatataacacagaagttgcaataaatggacaattatagaacttctaataggtgggcaccctttcaataagtagctgaccacgcacagcctccctctgctgctatgacactgtccttatgcagaggtaggcactgaccaccaagaatagggcctctgcttgtagtgatgcctttgtgttgactgtccactcaccctcaccccatcacccccatgaccaaggtttctgggggcaacagcatgattcaggctataaccaccaatccgcatggagaatgtagcaaagccaagacagacatcttccctactgctcaaaatctctagtttaggctgggcgcagtggctcatgcctggaatcctggctttgggaggctgaagcaggtggatcatttgagaccagttcaagatcagcctggccaacatggtaaatccccatctctactaaaaatacaaaaaaattagccagatttggtagtatgctcctgtagttccagctacttgggaggttgaggcaggagaattgcttgaacctgggaggtggagattgcagggagctgagattgcgccactgcactccagcctgagtgacagagcgagagtctgtctcaaaaaaaaaaaaaagtctctagtttaatggaggaagacaaacacagacatatgcaataccaggacaaagcaatgagttcttgaaaattctgtgataatgcagcaaataattttaaatgcccttccagttattcatattttcttttcttttcttttcttttttttttttttgagacggagtctcgctctgtcgcccagggtgaagtgcagtggcgcgatctcggctcattgcaagctccgcctcccaggttcacgccattctcctgcctcagcctcccaagtagatgggactacaggcgtccgccaccatg[187 bp omitted]tgtccctactgcctcatagttcggccctggcagcacaactgaattcatattgtcagagcccaagctgtgttatttactaaaatctgaccagttgcactaaggagaaaatgacagctggcagctgggagaatggactggctggtgtaagttgggaaaaagagacacaggtggcaggtgtctaaagaagcagagctgtgggtgtttggagaggcccaatcccaaatgccacttcagcttcaggcaaccacagcttcaaggttccgggaaggaaggacaagcgtgggtgtgctccagccaccaccctcctccaagtgagtcctgggataatgaatgagcggtcagccagagtctttgctctctgatgaaaggacctccgctgcagactgtccctctgcaaatacgattgtgccccaggaaccatctggcaaatgtgccagttccttcagcatttctgttatttccgtgacttttggcccctttttttcctgggatataaattgttgcagcaagccaagccaagccagcagaatgtttactgccgctttgcaggccttctctgagcctggttaaccccatggctcacagcctatgaggctgctcacagctaatgatgtcttggatgcatgcgtctcccctctgccgttcttgtgtattttggagtatgcagagccaggcatgtgagctgcagcccagagctacagtgaccacattgagaagctgggtttgggggaagtgcatttctgttgcaggatgtccttcacggagaagggacaggttgatttcatctctctgcagatgacgtggacagctccccaaggagccacaacaggccaccccagctgtaggacagatcacgtgctttggctgcacaggggaggatgcccaacaaaccgagacggcccacgtcagccactgggccccattttgcacagtgccacgttcctcctctgacctggcctgatggtgggcgaggctgaagagttatgggtcaccttcagaccctttgagccagcccctcagtttcagtctgcttcgctgattttcattcagagaacagataccggcatgtggaaggggagacttactcaagtcactcatctccttggtgatgcacttcatgggcagggaagccatatggagccgtcaaccataagtcccctcatcccaacccagggagtaccagattgttctaaagggggggcagaggaagcagtcaatgcaaagactccccgaatgtcactgtcagcctaacagtggacaagtgggcagttccaatgcagattcacaccttcctgccttagtacatgcagttccttctgtcttgaacacatcaggccccatccacctggtgaactcctactcaatcttttaagatccagctccagcatcacctacttggacgccttaatgccaccacatcctttgcacccatctctacttgtacctgtcacattgcacctgcagttgtttttagctagcatgccttttccacctgacttcgagttcactgagggcagagaactatgtttcactaatctccaggtctagagacttggtctgtaaacgtgtttatcagcagtgttttggaagggaaaatcagggattatggaatttagagatggattctcctccagaaatctcttagtccctcccactggtttcacaaaagacaaaactgagattaggaaactgccttccccagggccacaaggctaaacagtgacagagcttggacaagagcctaggtctg[131 bp omitted]ctgaccaacatggagaaacctcgtctctattaaaaatacaaaattagctgggcatggtggcacatgcctgtaatcccagctactcaggaggctgaggcaggagaatcacttgaacccgggaggaggaggatgcgggaggcagaggttgcggtgagctaagatcgcgccattacactccagcacctgggcaacaagagcaaaactctgtctcaaaaaagaaaaagaaaaagaaaaagaaatcagatcctgaactgtatttcccctgccagctgggaaggagagctgacggtaatgaacaggcttctgggcccgcacaggatggagaagggttagagggacaccaattgaatttagagctggaagggatgtcatagatcatctagtctgacccctgcatttacagatggaaaaaaaaaatggaggcccatgggggtgaggtgtctgcccaaggtcacacagcaagctggtgagagaactaagctgagaacgcaggcctcctaattcctagggaagtgcccttgcccgactgaatgaacctcccaccccagaaagatggatgaccaagcccctcccaaccggctgctatccgaaaagcagatccctggagtccttgactcttccaggctttgtcttctctctgctggtggtgcaacacttaagtagggtgcattctgcataaataataaagaatgcttcctttgcagggaggaaggccgcatctgggcaggcagtgtgacagatggtatttacaatgtgcactgagaagttctcacacagcctcgcttgggctgtgtggctgagagatggaggaaacggatttgagtgcccactgtctcactcccctgcctgatgctcgcaggcagcggctgctgctgttaccgctgctcctgcatttctgttcgggactgcttccctcacgcccgttgcctcttgccatactgaatatggagctccaggatgtcttgctgctgctgctgctgatgctgatgctgctgctgcggcctcaccatcaaaaagcctgcctcgtggaccccacgtcattcttcgctgcagcccctcactggagcaggtgctgggctgaattgatgttcttccccagaggaggccaacgaagtcctaagagactagatgctgggcagacttcccagggattctggcctcggggaggccttctctaggcctgaagaagtataaataggacaggttcattcaatgagcaaatactttttgtgaaccttctatgtgccaagaatcattctaggagtcaaagatgctactgcagggcaggggcaatgctcacgcctgtaatcccagcactttggaagtctg[134 bp omitted]gaggcaggagaacggcttgaacccaggaggcggaggtggcagtgagttgagatcatgccactgcactccagcctggctgacagccagactccatctccaaaaaaaaaaaaaaaaaaaaaaagataatactgcaaaccaacaaaaccaatccttgcccctcatagacagtgagctctaatgtcaaggtttgccacaggtctcttacagctaattacccttggctgtgccagactcgcaccatttctttccctccacagtctgttggacactctggtgcctggttctgtgcagtgggtaagaaaatcagatcattctctttttttctgaggacactgattgcacacttaggttgagagaaacaaagcagtaaatagaccaatggaagttttagctacaaagccagagacaacccccaaagtttctgactcatacaagcctgcagctggacaagccctatttgtgcgctgggattcagcctggtccagttgccctgggaaagcagtctctgcagacagtggtcagcggtcggggccaagggcactcactaccatcaggggcttttgtatttcactctttaaataagaactttggtgacaggcatggagaatcaaacctccccggggcccagggattttagtgtccccatttataaaatggaggcaattgtatctgttctgctcacctcagaaaggcttgctttttgaggatgaaatgcaatggcaaatgcggaagtattttgaaataaaggcagcaggcatacaggcgcattattattatgcagaagaatttttttctccataacataaaagttgtctcttgttgcaggttgagagtaataactatataattagactttgtgtcatatcaagagaggcatcccctttttttcattaaacagacatttgttcagtttctacagtgtgcaatgttgtgcattgcgaaggatgcagaattgaataagccataatcctccccttcaaggaatgtacgttctagtatcaggaagataaaacttagaagatataattcaaagtcaaaaggaaaaagggattcagaggaaggagtggttcatttgggttggagagttgaggaaaggctttgtggaggagagagcattcgtcagagagatgggcaagattctctcctttattttaagggatcctcccacctcagcctcccaagtagctaggactacaggtcccatgccacc[138 bp omitted]gcctcagcctcccgagtagctgggactacaagtgcccgccaccaggcccggcaaatgttttatatttttaatagagacagggtttcacc[140 bp omitted]ccaggctggttttgaactcctggactcaagtgatcctcccaccttggcctcccaaagtgctgggattataggtgtgagccactgtgactggctgatgggtaagatagaacaggtggtttactgaagacacaggacctgcctatagcacagtgaaggtcatatggaagtcttgaggcccaatgagaattcagaaatgggaccctggggaccagccaggccccaaggaggtggcaggaaaggaaggtaagacctggcaaagtagctgattgtttccctgaatgtgtgactggctaaatcttgggactgggaaagtttttttctgtgcttttctgagctcaacttctgggtgcccacgccttgctttgaaagggtttggtctgtgaacctacacatctctcagtaatgatttaagttactcagaaaactgggagccctggagtgaaaggaagagacgaaagggaaagaaatccatgtagcagtcttgctccgtttgatctggcagacagcgggcgatgatggaagaatgctggagatggaggtggagggtggtcggattctgccatcctgagccatgtctgctgtttggacttgcagacttcaaacacggctgggggattcccggaagacaaaagaattcagggccgggacttggatctcagtcaaaaataacttacgtcttcatctcaggaaggcaaacagtggtagctcagggctggtttctcagaagattagagctacaggtggggacagggtgccacgaaggtcagtttaggtttaagctggctgcagagagagaaggggctcggagggtgtgggtctggcagagggagatgtcagaatgaaccccaagtgaaagaggttctggagaaaaagtcatccctgtttgccccccttctgggcattgccattgctttgagcaataattacagcccttcatgtttcttccctggcttctcattagctcaaggtgtccacaaacaaactgctcagccccctttgccttcctctccccgcttccagcagctactcctggcttttccatggcagccaactgtcccagttcccaggaccagaacatcgggtccttaaaaaaactccttcctctcttggagggcacatttgagagactcagccctggaaaggctcttctctctctcctcccccttatcccactggactgtcattagaggatgacctcattttcccccaggaggccagggcccgggtctcatcccctttgtactatcagtacctcggccagggtctggcacataatggacactcagcacgtgtgagctgaatggcactgctgagctgtcgccaacttaatcttcctaaaatgctgctccagttagaagccatcaccgcttctctatctcccactgggcgaggtccaacctcctcagactggcactcggggactctggcgacacagtgctcctcgcctgcccggccatcctcactttgtgctcagccacttcatggttcccaacacagtcaacagctttcctatctctgtgtctttgccgcagcagttccctccacctagaaacccttccacgttctctaccacaagcttgcccctttcaaggctcatctcaacatcatgctcctgcccttctaaaccgagtttgatccacccttccccagcccttcatcctgctctgcgttgacttcaagtgtcttgttaggaaccttaaaagaggccatggtgtagcgcacttgcaaaatgaagagcaaggaagaagtgccaataggcccagttccgtgtcacttctcattagcgccaaaggttctcccagggaggggcctctgcatggcacacctccaggcatcgacgagtgcctgcctgctgcagctggtcagtgaaagtgacaccatgcctactccctcctctgcccccaaaatgccacagaatatgccagtccttaggctgtctcaggtgagagtagaacaaaaggtgtcagggtgcctagccactcctatcccctggagctttctaggcctggaccccaggccccatgtcctactgcctgctcgggagtgggttgcagattcgcctggagctgaggggcagagtggtctgaccagctgggcgtaggtgacattgaggacaacaggtaaagggtggcctcaggctcatggaggatgatggatgtaacaacttgtcctaacagtctccaagtccagacaccatcacctcccagcaagggccaaggtgagagaagctgccccgtgaagcaagaatcctggtgagagatcaggaattccttcttaggagacttttggaaacatagcctgccaaggcggggtaaatgttcctagggacagaaggaggaacaagatagccttctggatgtttcccatcttccctctcccttttattctaactgctgccgcccttgtgacctcttccttggacagcacctctcatggccctctgctcaggccaacctccctcctgtctagactctacactacagccaaagggatcttttttgtttgttttgagacggagtctcactctgtcgcccaggctggagtgcagtggcagatctcggctcactgcaagctccgcttcctgtggtcaagtgattctcctgccttagcctcccgagtagctgggattacaggcgcccaccaccacgcccggctaattttttgtatttttttagtagagacagggtttcaacgtgttagccaggacggtctcgatctcctgacctcgtgatccgcccgccttggtctcccaaagtgctgggattacagccgtgagccaccgcgcctggccagggatcttttaaatattactctactgctcacaatccttcaatggctccctattgcccttaggtaaagtccaagctcttttcccatgaaactcacagcccctcacaaccttcccgtccaggctgggctctttagattggtcatcgtgctccagtttccagccatgccaaactgcttgtcgtttgcctcccatatgatgctgctccacaagcctggtcgtgctgttccctctacctggaacacctccttcaccttttccatgttgcctagttctggaggcttatcctttgggaagccttcctggacccacagcgaccccctcctttggagttctacaccttctgggcttcccttgaatccaggacttacccttgtgttgaatgtgactgtcacccccaattatccatttctggagggcagggtctggttcttatccacctctgtattctcaaagctctgtcattggtacttagtaggagcttaatacatgttcaggaacagaactgagcctgctaagctcccttccccacgaagggatgacagagttggatatgttgataagagctgtccctgggctgatgaagaggcagctccctgggtagctggtatcagaacactgtccagggtggctgggcatcccagcagagtggccaacccttttctgtgcccttctccttccagttcccctggaaccagacttcctggcccacttctctagtcccagagatctaagtataacagagccaacacccataccggtcatgcaaatgacagcctgggatgcgggaggcagcgacacagaccccagggccccagcggtcatttgtccttctgggctcctcttcacaaaggaatcagcctctcttctgtcccctgaaggctgttttcaaaatcacaccccatgcagacagttttatttacaaggaaatcttggcaggatcttgacttgttagtagagtagggatggggaggagggtggtgagaaacaaaaatagttgaaatgatcacactttctgaaacagagatgaaaattggtgtctgtagcaaactcacctaattagaatcaagtgaattcccttctcggtgtttaaggggagcagtcattgctgggtgatggtcgcagttcggatcctgggcacggggttatgtctttgctttctgaagatgactgcattagttgcagctctcactaatggaaaggagcctgttccgtttcccagaggaaggaagagggcaaagactagtgagtgagtgggtggtgggaagaggaaagcaagaggagtggaagggcacagccttggtgtgggctggggactgactgcgagatgcctcctggagaagctcctgagcctctggggagagctggcccctgccaggccggccactagcaccatttacagccagagcctctgcttcgggagatggtctctcttgggggcgctttcctgcagggaaacagcatcgattgttttctttaaaagatcccctactccgttttggctaacttcctttctgattgctttagtttctttaccgtccctctccccagatggggcatttccctgggcttacctttgtccatgtggtcaaatgaagcctgggcatggtcacttagctctgggtgtaggaagggcaagatttaggctttggggcccacgaccccgcaatctgacttctcccatttctgggcctcccgagacctcccagaatctgagaccgcagtgaatagggcgtaaggataatggggcgggaggcaggaatcccgtccttacaacatcgcgcccccaattcactcctagttaaccctgacgtcgccaacatagtgtctccatcacatatctgccacctccaagtgatggttaagccgatggaagagccaagcccgggcccggagtgcaggccggtggtgaccgggccggggacggcgcagtccccatccccgccccgggcagcgccaccacttcctcgccagccccgccgcagccctcccgctcccgggccgcgccgctctgaccgactgggcccgggtggcggcgcccggggtggggtgcggggcgggggccggcgttccccgcgagcagccccgcccccgcccgcgcgccgcccccgaggactccgcggggaggaggagactcgggcgcagagcgggggccgcgagaagcgggaagggagcgcggggagcggcggggccggggccggcccaagggcgccctcgcctcggagccgggcgcgagggccggggcggaggcggaggccggcggggcagctagcgcagtgaagtttggcggcggaggggccgggcgtcccggggtcgcgaggaggcggcggcggcgcggggaccggggccatgggggcgggcgcgggctgcggagcgggcgcggaggcggcgcggcgcgcactgagcccctggagcggcgcggccgccgcggcgcaaagttagcccggcgccccgggacgagccccgcagccgccgccgcccccggaccccgtctcggccatgggcgagcaccccagcccgggccccgcggtggccgcctgcgccgaggcggagcgcatcgaggagctggaacccgaggccgaggagcggctgcccgcggcgccggaggacgtgagtgccccctccccgcccggcaaactttctagggggcgccggggggaaaagccgcccctgtctcgccccacgccgggcaacttggaggtttcagggtgacgcgggagcgccccggattggccgggtccccgcgggcaggagggggcggagggaccggtctccccgaaacgcgcgcgcaccgcttcccccgctctggttcccgcggcttccctgcgggacacagcaccgccactgcgccgcggacctgtcaccgccggagccccctccccgccgctggtgcagtgcccgggacacggcgttttcccgcagaggcggccgcgtcacggcggtgactccccctcccctcacgcccgcgacctgcgagctcccggagctggggaaggagcggacgccgcagagtccccgtccctggccatgcaagccggcctggcgaccccttcctccgctcccggattagctcccgcccggcacctgccttgccgcgacactgattgaaattcaagccggcccccgcctctgaccccggccggagcagggaggcaaagagtgctgggagcggctttgctcctagaaggaggcccgggagtccaagaccgtggcggtgccaggggacggtcccctgggcgaggagagggaggggctgccccgagggcttccccgccgtctgctgctcgggtctccatccctccggtcctgcgggccggccctgcgaagccctgggaactggagtttcttgggttaacctcccggggctaacctacacataggggtgaaaaaccgggcagacaccctgccctgcccactcctccctcagggtggggagatggaagtgaaaccaggcccccaacccacacaacgaaagcgggaaagtctgaatggggttggggggtagtttacgatcttctctctttggcgtctgcggttaaatctatcacttccttctggccctaaacccctggcagaatctgatgtagtcaccacttagactcagccttggaagagaatgggtgggcttcaccgcattcggcattcaccacccccccttccccgcaaaaaaacaaaaaacgaacaaacaaacaaaaaactgcaggcaaaatgttagtgtttatgcagaggtgagttctcctggggggggaggggggggctctagctcccagcaggtgagactcattgcgccggggtctgatggaattgcacctggccatgctctcccaggcctgggagtagctgtggacataagctttaggcagcagaaattattagaggcgcttggacatatttggacgcctttatttagtaattgttgagaatcacttgttctgccagttccagaaccagcaacacccaccttgccgcccccgcccccaccccatcccttactgtgagtttcctccctctgctcagtgtggactcattggggagctcctcccagacttcccctgctctcctgtggccagtccctgagcctggtcatgactcctgggcagccgctgggaggctatgtcagaaacatccgaggactacagagaccttggtgataagtgtgtctttctttctctcctcttcttcctctcctgcatggcctccctctctgccagcactggaaagtcctgtttgatcaggtatgtgagcagttaaccccccatttccttccagccctccctgaaatcggtctcagtctccctgcttgcgtgggcttccctagctccgcgctcctgagatggtgacgtggggtgggggtgtggctttgtgcatctctagggctgaacgacactgctctccaggtatcaggaggaagagatgggctcccctgagaggatctccctcctgcctcctccctactctgctgcaccagagccgggtttacaccatgtagaaattggacgttatatattgaatgcctgggaaatcctccatatgccaggggattgcagtagggggctggagaggtgggggaagggcttgggctgacaatccctctccgtttctacctccactatggagggtccatggccaccgctgaagtcaaatctctgccatccttgggggctgactcacagtatggactcttttgaagtctaattcaatgtctttaattctgtcatagggatgagggagtgctgggaggttacagaggggaaattgtgtgtgattcttcgcaatgcctggagtccaggtgtagggcatggagttgggggtgccaagtattggcttttgaacctggagatggacatttgaccttcagcaaggaaatggttctcctcttagcattcgtggtgggtgctgttatgtgcttccttctccctctttgccccatgttggaggatagttgagtgctatagtcctggggtgagaatgattgtgccatgaagtttgtgcaactttaagaaattggtgtgagtgggccagagggaatgtgttgggtaggagaaggagataaagctgaaaaattagcttgaaccaggacttcgttgtaggcaggggaagccttagaaagttttttagcagggttgttatgtgatccaagccaggcttgggaaagctccagtgtcttaggggataaggagtgaatgggctacggggatgagggaagctaggcaggagctgcagcactgaacagaggcaagaaggtgacagtgaggatggacgggaagagggacatggtgatggaagaattggaagatcttaatagaccgtaggtgaggggaaccacatatctaactttgagattctgaacctaggagggaaagaagttggagtggggccaggtgtggtgactcacgcttgtaatcccaacactttgggaggctaaggcgggaggatcacttgaacccagtagttcaagaccagcctcgccaacaaagtgagacctcatctctacaaaaaattaaaaaatcagccaggcatggtagcacactcctgtggttccagctacatgagagactgaggcaggaggattgcctgagcccaggaagttgaggctgcagtgagccacgatcgtgctactgcactccaacctgagtgacagagtgggaccctgtctcaaaacaaaaacaaaaaacaagttggagtgaggagagacgtttggcaaaaatgacaactttggtttgagacaagttcagttagaggagccagccggttgcagatgccggagtgggcgtgatgacacggaattgcagcgcgaaaggcctggggtgaggatttggggtgatcatccacattaaccacgaggtctggctgtggtttgaagttcaaagcatgcactggctcctgtcctgacgggtagagcatctctccctctggctcctaagagtacagcagctgctggcctgatgccccaaggcaggagggagcccgctgcgccactgccaccactaccaccaagctgccagcccttcacacctcctgccagatttagaatcagaacctagaacaaagtgtatcattctttttttttctctgtctgtgtctatctttttcatttgattaatttcctttgccagtccctgtgtgtatgtgtacattttaaaacaaaccatttgggtgaaaggaagagagcttttagtaggaagattttggaactcaagggagcagaaagaatgtgtagcacctaatagtagctagtggtctattaaatcgaatttttccaactgaaggtaggtcctgggtcctgggtgtcacaaagagcatacccctgcttctgggaggcctgcccagaattaattctaggaaagaaattaggccaggcacagtggctaacgccggtaatcccagcattttgggaggctgagacaggaggatggcctcccaaaaagtgagaccctttctcaaaaaaaaaaaaaaaaaaaaaaaaagaagcaagcaaccctgatagatcaaactgcagtcatggatgggacatgacacctctcagagtccctgtaagcacaagtgactctggagttcgccttccagagatcaatggcatgggtggctagaaccagtcaagtatctcctccctcccttcttgggtcaagcagacaccagtggtagcccaatttcaaactgggatctgctagggtctgttttccaggtgttagggatggattagaccagtccctccataatgtctggttcttcagcatgtggagtagccttgatctagcatgacgccaactggaccccaagggctagaagccatggtgttggtcttgttggtcctatatggtcaccgtcgaactaaatggccaggataccttttgtggggactggaggtgatgaaagcaggtgaccccagtcccatggaagcttctgcatccccctccctggcattgtggcatctggcccactcaagcaggagtgttagcagggccaatccatgccacgcaccctcactcccccgattcttccccatgggtcccagaagttgcagcaggtgggagacctgagggtcatcagttcaactcggtatgttccatgtgttcatgtcctgttcaaacttcttcttgagggaatcgtcttttcatattttggagatcttgatggttttcctaaatatttaagtagatttaaaatttaccataaatattagtctgttgttatagtataatatcgtagtaaagatgttttatttttctgactgggtgctcacacctgtaatcccaacactttgggaagccaaggtgggcagatcgcttgagcccaggagttaaagaccagcctgggcaacatagcgagaccccacctccgttttttaaaagtttaaaaaaaaatttgttaaagaaaaaagtcttattttctgtggaatctgttgagcttttccttcctgattccttctgttgattcagacctgagatagttttcgtacctccccagatctcataaatatgcccttttatttcctactactttttctatgattaaaaacatcatataaccctgcactccatctgcatctgattcctatccagctatgctagcatcacttattaagtaagccttctttattatattgtttgagaaatgttatttggtaaatttttgtgtgtggttgggttgatattttatttctgatttatgccactgatatttataattttgcacaggtaatgtcccctttagttatcgctttacatctgttccataggtttctgaaaagcttccctttttcgggttatgctttgatagtcttattctcagtcccttcctgaatcccaggaagctttgattcaaggtcaaatatttagtcaaaggccaaatagcggggcagtgacagatatgggaccagagcccagttaacccacaaagggcttcttgggttggaaaagtcatttccaggtttacccttaaaaatgcctccaagatctgtgaatgtttaatgaacaaaagagtttggagcagagttccgttaagtcaacaaagcacaattgctttcaagctcaaaagaacaagagggaaaatgcagtattgaaagtaacttgactatcttcctttttcccttctcactgggagcctgtatttcctagacccccaaaagagatccccaattttgctaatctcccagaaggaaagcagacaagtactgactgtctcaccaaaattataaacataaacatgtgctacgatgaacagaaggcgtggatccgccgcttcggtgggttgctggggtcagaaacttggatttggagtcagatagacctgggttcaagtcttactcactttgtgatcggaggtaattacattagctctctgagcctcagtttcttcctctgtacaatggggacgtaatatttaacttcagggtgactatgagaattaaatggaagtggaagctccctttgcaatatctgatttgcagtggatattcaacagaagtatcttcattgagaatcagaatttgcttggagaagcacaaggaccacttctgagatccaggcccctacggggaaggcagctcctcaacacttctgagcccagaggatttttttgctttctgacttccagtgtctccccttcccagttccctgccctccagcctggggctcttcccttggcctgacttcatttgtagtcccccctgcaagctggcttaaaggtgttctgggagctgaaaagaggttcagataagacccctgaagggattagcaaggagctgcagagaaaactcctgccccagagacagggtgttggccacccccagaactcacaattaaccagcagagcagggttcccagagaggaacaaagccacgggcttaactggagcccttgggctctgcacccccaactccttatcaagtggtctctaggacccttgaggctgtggactcctcttcaccacagagcctgcttccctaccttactcctgccccagtgaccccatcagctatactgacattaacccttttattcctgaccactcacagaaatgcatttgattgctttgggcaacagggccgagggatccgaggttgaacttcgcctggctgcctgcctgacacataatagatacacacgtttgagcgaacgacaggtcgaactacagctctgcatgcattgtcttgggttaaaatatcctctccaagagcaggccctgactgtgcagctaccacactcacggcagcccctctgccaccgtatggctgctgccacctcaaggaatataggttattagaaggttaatggaggcatcttgtccagtctgctcattttgtttttgtttttgtttgtttgttttgagacatagtttcgctcttgttgcccaggttagagtgcagtagcgcgatctcagcttaccgcaacctccacctcccgggttcaggcgattctcctacctcaacctcccgagtagctgggattacaggtgcctgtcaccaggcctggctattttttggtatttttagtagagatggggtttcaccactttggccaggctggtctcgaactcctgacctcaggtgattcacccgccttggcctcccaaagtactgggattacaggcgcgagccaccgcgcccagcccagtccgctcattttgcaaatgaggaaacagaagtcagtggcctactgaggtcacttggtgcaatacagccagagcggagactagatcccaaccctgctttctatctgaactgtgttcctgccaccaggccattcacttagttggtgccttgagtaaccaaggcaggtggagaggacacatatctaggtcaagtctcagttctgctcctactaggtgtgtggcaatgggcaagccaggtgacctcttcacgcctcagttttctcatccgtaaagtgccagcctagtaccttcccccctacgttgttgtgaagacgggatgctgtgtgtatagtgcttggcacagtatgtagtgagcacctcataaatactgttgtgtgttacagcaatttaaacaagtaaaaaataaaaagacatataatagagtaggtttttttgtttttttgtttgttttgagacagagtctcaccccgttgtccaggctggaatgcagtggtacaatctcagctcactgcaacctctgtcttccaggttcaagtcattctcctgcttcaggctccgaagtagctgggattacaggcgtgtgcaatcacacctggctaatttttgtatttttagtagagacagggtttcaccatgttggccggggtggtcttgaactcctggcctcaagcgatctgcctgcctcagcctcccaaagtgctgggattgcaggcgtgagccaccgtgcctggccagacctcggtcttgaatcgaagtgttcagagccccagttggggttccttccaccatatcaggctgcctgctttaggggagaagctgaaaaatcacatttcccctgaactttccagagagaaaggagagaaggttttggacaaaggctgcctggggagtgttgtgcatggcagagggtgaagggtgagacgaggcgtctggccatcaggtagacagggctagcactcctctgtctggtgttctgatctggcaattcctgctggagctttacttagtggtctatcgtgacactggggccattgtcttgtgctagagaaaccagtccgtgtgtggcttaagctgtgaacaactagaggtagcccccatcaccattccccaggcttttgtgaagcaaggtacaggttgaaatcagtatatttgagtcagtaaatattcttcgagggagcaaacattgaatgtctaactgcatgcttataaatttgttgtctcattttgatctctcagcagccctgtgaggtgtgtggtgctgcacctcaaaagaggaaactggctaggtgcagtagctcacacctgtaatcccaccactttgggaggttgagaggggaggatggtttgcttgaggccaggagttcaagaccagcctggtcaacataacaaaaccccttctctatttaaaataaaaagggaaagtgaggtttgagggggcggagcttgcccaaagacagcagtgaggaccttttgcggcagtcgcatgtgtatatatgtgtgcacgtgtgtttgtgcatgagtgtgcatgtgtgtgtatgcatgcatgtgtgtttgtgtgtgcaagagtgtgcatgtgtgtgtgtgtgcacgcatgcatgtgtgtgtgtccccacaaggcttctgggtagctcctgaaatgggccaggagatgcaggagcagctgagcaccctttatccttccagccctttatcctgcctgccatgcacccgctctgcatcttgctcccctccttctccctggatctgttggctctctctcctctgggggaccagagagaccctttggtggctgccaggagaagcagcggcggccagcagtttaggctgaaggggagagatggggcgatgtcagatccctccctgctgacattcactccccactccctgcctgcagttcccttgagactcctgggcttcatggccatgactcggcttcagtccccaggcggcgcgtcaggctgggccggatgagtcagcatggatgttacatctgctcctcctgggtacccaagggcctctgagtcacagcccctggcagccccctcagtggcctgccaaaggcaggggccattctggaatgggaagggagccgtctgtgtgcctgggaggccttgtgaggaggtcggaaggaggagaaggggctgcaggagtcccccaggggcgggaaggaataggcccagtggaggaggcagtcccccaacccgtgctgcccaccccacccatccccagctgcatgcgttccagggaaggtgtgaggtcgtttctttccctcacttcccagatgttgggagagctggatggttttctggaagcatgccgattgtcaagggctcagcctgagttcaggccaggatgcctgtctctccctaatcagcctggctgccccatcctaggattcggctgttcgactttgggcaagggggatgctcaggaggctgcttggggcttttgggagaagcaccatgagagggctgagctgcctcccgcacccctctatggtggcagctgagggagcagaaataataaaactgggaatcccagaatcgtggaggcttctccagctgtcaggggcctggcctggccagatcccaggggagtaggggtcacaagggcccctcatgcctccatctggtctctctccttcccacagaggcttgaggtctctgaaaacccactcccagccccagcttgaagcaggccagactgcctgggtccaccccttccagagtgcctcaggcagggggcatgtctctgagtacctcaatttttgtatctgttaagtgggacgaaccagacttactctagggttggcatgagaataaaaaaacaaaacaaatgtgaaagtcagtattttaaagagtcaggggaaaaggtcaggggaagggtatgaggtggttttctctatgggacaaaccagacttactctagggttggcatgagaacaaaaaaacaaaaaaaattgtgaaagtcagtattttaaagagtcaggggaaaagatcaagggaagggtgtgaggtggttttctctatgggtgaattagcatcctcatttgcaagaaagcagaactgggagagaaagctcctactcccctaacctccccgctgaccttggcagctgcagcctggacctaatttacggggctgtaaatatccatgaaagggccagagttcccttttgggctctggctgttgggtggggagagctctgctgaaccacaaacccctgggcagcctcgttaattctgctctgctcagaagacgagtaatgaggcagggggccagcagttgagccatggtaaccttcaccagacagctgcctgcaccatacttcagccctagcaccgtactccagccctagcaccggactccagcgctagcaccgtactccagccctagcacagtactccggccctagcaccttactccggccctagcaccttactccagccctagcacagtactccggccctagcaccttactccggccctagcaccttactccggccctagcacagtactccggccctagcaccttactccggccctagcaccttactccggccctagcacagtactgcggccctagcaccttactccggccctagcaccttactccagccctagcaccttactccggccctagcaccttactccagccctagcacagtactgcagccctagcactggactccagccctagcacacgtgcctgtgctcatttcccagggctcattctgccttggtgtgtgtacatgggagaagacaatggggatccgggtgggaacctgctctagatcccaggtctccaccttcctgactcaagaggtctttaccccagtggcagctggttccttggctctgggtactgcctttgaggtccttgaaagtactcacatccctcactgaggtccagggcctgtctagagcatggacagggagagggtcctcctgggagagagaattcaagccttggaggcagagaccagacgtgtgtttgccctgaaaatgcagctggtgaaaatcacacatacatcatagacacaagaagacagaggtatgtccttctctctctcatgcttccctgttgctgggcaaattctgaagccttggcctggctcatgggcctgcagctgggaggggagaagcagtgctgctgtcctgggtgctgagcaggcaaatcccagctccagcggggtttgctccctgagagctcggctcagtggccccattaggccagtcacggactcctcagcctcttctgaggcctggtgtccccagtcaaccctcaggctgggcctggagcccacagacttctagcattgctggaagactccagcaaagtgtcagctgctcggagacctatgctactcatggggcggaagtgaaaggctctggttctgaaccagcggcaaaggggctaggttcaccaaagggaaacgtgactgctgtggactcataccttgttcccaaagagtgttccatcaagtgttactgtgaaaaaatactacgaccaaaggtcaaataagtttgaagaatgctgggctgaacaaaatcagacaggtttctccagcctaaaaccttgcagagtccttgatatggtgcgttatgaccctccaagaggtttttccacttgtaggaccacagaacccttatttcaggtaccatcaggtacctggtattccacagaacacacattgggaaacccttaaaaatcagctgggtgtggtggctcacacctgtaatcccagcactttgggaggctgaggcaggcagatcacttgaggtcaggagtttgagactagcctggccaacatggtgaaacctcgtctctactaaaaataccaaaaattagccgggtgtggtggtgggtgctgtagtcccagctactcgggaggctgaggcaggaaaattgcttgaacctgggaggtggagcttgcagtgagccaagatcgcaccactgcattccagcctggcgatagagtgagactccatctcaaaaaaataaaaataaactcaggggctatgtttcattcaaccgaacaagacagagaaaaacaagggagggcaagatgggaccagccagcacagtggaggaatcctgaactatttctgtcttgaccgcgaactcactctctgacctggactagtttattttgttccttttgccctatgcacctgtttccccataaaacgagtgggatgcctgggccacagttgatccttagtgaatatgtgttaggtggacacataagaggattggatgagggtctctcaaactctctttagccacagcactctagtgatgggagagagtgcaggctctcgcccctctgcctggatatgaatccatctgcacctattaccagccattcacacttgggcaacccagctcttggtgccttggtttcctctcctgtaaaatggagctcacaatagtgtgtacctcttagggttgctgtgagatttaaataggggggaccactctcaaagtgaccaagttaggacactttgagagtaaaggagctactgtaaatcacactcaaggctgggcagggtggctcacgcctataatcccagcactttacgaggccaaagtgggaggattgcttgaggccaggagttcaagaccagcctgggcaacatagcaagaccctgtctctacaaaaaaatttaaaaattagccaggtatggtagcacatacctgtggtcccagctactcaggaagcaaacacaggaagattgcttgatcccaagaattcaaggttatgaattctacaatcacatcactacaccccagcctgggcaacagagcaagatcctgttgtttcttaaacaagaacaataataattaatatgcttggacaacaggtatatgccaggactaacacagaaaaaccagggtgtgtggtggcctgaggtttcagtcaaggggtgcctgatacatagcaaactttccacacatatcagcccttatcgtgttgctgttcaccaggatagtatgcagaaggccagcacataaactagctccgaatggagctgccctgcctgaggagggctgggggctgctcctcagtgccctccccagcacctctgggccttggaggccccatagcccctagaactctgcagcgtagtttgaaaaccactgagtttccctcctgctccgtgatttctgattccctgacctgctgtccctctccccagtgttgccaggcccctctgacagcacagacccaaatgaccccggcccttcctcactccatgtggaattgcctgctgtgatcccgaatgtcctgtagccccttgactgtgcaaagattccaaatagaagattggctgcccttgtgggctgcatgggttgtggatttctcattttctaccccccgtttccgtatggcacgcttatgtgcacggggtgggtggcccttatagctccctgagaagagtttctgcttgattgatggagaaacagaggcagggtggttgaatgaactacccaagatggcacaacagctgcgagtggagcctctttctggaactctcttcctccccttgccccagactggggaaggagccccagatggcagcaatacaaagagagaatctggtaggtcagttcccctacctagatgggctgagcgccccaggaatgggtgcagcatagaggataggagaaggcagaccgtgtgggaggcctcaggctgaggccagctgtgacctagaggattagggtcggacgctgggtgctggtgcgattaaaggccgaggcaggtgggcgggccagctcctctgtgtcttccgctcaggctgaatgtggacttggccgcccctccctccaaggcactgagccctattcaggaggcagcttccaggacgctcccaggctcctggctccctgctgggcccctacggcccattcacagcccacattctaacggctgccccgaccagccccagagcagccccggtcaggccgcctcaatcccacccagcccagaccccatcaggagcacctcactaccaaagtgggtgaatctggggcacagtgcctgggggaggggagcttcaggaccagtggcacggtattaacaaggaaattgcattgatggggcttgttttcccgaaagctccaaaccacagtttggatctgcctaatgatcccagtcctccttaagcaggctgtgaaggaggaggaagggtaggatatgtgcccagagagggtcagccacacccccatcacagtaggatgctcccagcttcgcagcaagggaagctggtctggcctccgagcccaggccctggtgagctgctgccctgcgagaggaaggtagcccactttgtagatgaggtagttgtggctcgggagtttgctgtaaatgacacaaaccctggttagtggtggagacaagcatgaggtttgccttgttccttgctacccctgagtgaggggtgcagcctctgttagaaactcccagcttccttctggggcaatgggatgcacctctctcctgctttctgtgcactcatgctctctctggctctctctgtctctttctccctttgcctccctttctctctcccccacgccccatacccaatgtcagcacctgcccttgctttcatcttcctgggggtggggttgggggttgaaaggtgtcctgtgcattcatggagcccaggcagccggcccattgctgcctctccctccccctgccccagccgtcctccatcctccgggcatccccaaggcctcattattagggtagcggtgaccccgccccccattgtctggccctgccatgaaaggtagagttttggcagagaaccgaggctcggcctgattccagcttgttctctgctgtctggagcctgttactatgcttggggcagggcaggcaggccctggtgggggtggaggcttgagccacagggcagccatgtcactaggacaacagcagggagcactggagggggagattgagggggagagcaggtggctctttgtctgcagcctgatcccagcacccccactgcacccccaccccacggccctccccagcctgggaggcagcccctaggaggggattggtgcttgctcccagggcacgcaaagtcattgggctcccttctctaggccgaggcaggagagactgcacaagctgtgccgcagaccaatggccctcctgcagcccccactggggggctccccaggactccacctgctccttctcagcccgcaccccaccccctatctacccacccagaacaggagggccaggctagtgagaccctgtgatggagtaggggttggcacaggtggcttgtagagatgggaggggtcccaggcaccaaagaaacagaccctccctggctgtggttgccacattccctctccagggtccatttccttagctgagcaatggaggaggtcagagctgttgctgtccggggctgtttcctgatttaaaaatctctgcctatggtagggctgtgagactcatggagccccttcctctcctgggcccacactcacctatttggtccttaaattttgttcctgggcatcagagcagtccctggagctggaggtcagtggcacctggccatggcttagaggagtgctcagctgtctggaggtggaatcctggctctgccgcttgccgggcaaatcacttcacctccccgtgctaactcttctgtgcctctatttcctcgtctgtaatatggggacatggataggatctgctacataaagttgtgtaggagtcaaagacattatatgcataaggtgcttaaacagtatttggctccatgaaaacactcagcaaatattaggtgtttttattcttcaagatctttactgagcaacaagtaggtgagtttcctgaaatacttggtgttgtgaaccaaacagatgtcatccatgaaacctggcattttggcttgaaggtgggagatatacagatttaaaaatatgcctcggggccaggcatggtagctcatgcctgtaatcccagtactttgggaagctgaggcaggaggatcacttaagcccaggagttcgagaccagcctgggcaacgtagtgagagcccatcactacaaaaaatttaaaaattcgctggttgtggtggcacacaactgtggtcccagctacttgagaggctgaggtgagaggattgccgagcccaggaggtcgaggcttcagtgagctatgatggcaccacttcaccccagcctgggtgacaagagtgagatcctgtctaaaacaaaaaacaatagacctcattggagatgtcctttcttgttcaattctgtggagattttttttttcttttttgagacggagtctcactctgtagcccaggctggagtgcagtggcacgatgtcggctcactgcaagctccgcctcccaggttcaggccattctcctgcctcagcctcccaagtagctgggactacaggcgcctgcaaccacgcccggctaattttttgtatttttattacagacggggtttcaccgtgttagccaggatgatcttgatctcctgacctcgtgatccacctgcctcggcctcccaaagtgttgggattacaggcatgagccaccgcgcccggccttctgtggagaattgaaatagcccatgactgagactcctgactgttgctctttgattttctcagaaatgctacacacagaatccactttcctaaaatagccttcattgaccatctagaaaaggcgaaaacgtgggtttggtattccggactccctcgtcatgcacacacatacatcctcaatgtctgtttgccttttaaacaactcacagctgcatctccaggatgcagtggagtcttatgtagggaagcaccttctgaacaagaaagctcctggcgtccaggagatgcttggtgttaaaagtgttgctgtgggcattgggtgggctccgtgaggaaagggatagaaatgataaggtcttctctgggagaggtgactaagatcctgccttttcttcttttttttttttttttttttttgagatggagtctcgctgtgttgcccaggctggagtgcagtggcgtgatctcagctcactgcaagctccgcctcccaggttcacgccatactctcctgcctc[134 bp omitted]ggcctcccaaagtgctgggattacaggcttgagccactgcgcctggcccgatcctgccttttctaactgaactgatgaggcttttcatggaaaatcagtgcctgtctgttcatctgaacacccactagttattcatccaacaaatcttgattgagtgctgataatgccaggctctgtgctaagtaccggggataagttgtgataccgacccgcgaggcgccgcggtccaaggaggaggcaaaagcagacagacatcagtgtgggctggaggcccagaggtctggacagaacagagggttccgtgagaacaggccatggctgaggtgagcctgccaagagaagggcatatctgagtagtcaggaagggtgagtcggagtcttccagggagacggaggaagaaagggaatcccaggcagagggacccacgtggtgcaaagctgcaaacgatgaaagagcacggtgtaaaacacacagacgcgcactcctactcatgcgcgcgcacaaacaccccccaaacaaaacaaaaaccacagagcagagtgtctctggggagccccaccaatcctccccgcctgggtgtgtgggaggggccatgggagggcggccaggggcagaaggacttgcaaggcagtgcttcttgctccccagggccctctggcatcccccctggggtccctctggcccagtcccctttccctttgccagtcgcagctgaaatgtccttctcctgctgtcctctcacccgtcccaggccccagaagtttctcatcttcctgcactcattgccttttcattcgcacttccctctccatggtgagaggaggcggtttaacctctctgagcctcagtttccttatccacgtgagatggttggattgggtgatcctgaaggtctgcaggtcctccaggacattcctatttagatgtttcccaggggggtccttggaaatctcccagacactgagcctctgccaggggctggggactaaagccagtgaatagtggtggagatcagggcacccacatcagtgtgaagaggaggtggtgccctgctgaccctgctgctgtctgcttttccctcagtttgaccctgggaacacaggctacattagcacaggcaagttccggagtcttctggagagccacagctccaagctggacccgcacaaaagggaggtcctcctggctcttgccgacagccacgcggatgggcagatcggctaccaggattttgtcagcctagtgagtgctctggggcccttggtactcggggggacctgtttgagggttatggcttccacacatttaaaggatttaggcaattcaaaggatctgttggcctgcagcattgaaaaagtccaggcttctgaggtgaaagggtgccaccaaggactcatcttctctttgtctctaggctctgccctccgcagtgtcagcccatcctcaaggcagcacctggcaatttcagaccctcctgttgtggcagcaaagtggctgcagctgttccagccctcataccctcaggctgcaccttgcagaagggagggagggagggagagagagagggagggagggatggagggaaggggagagagaagaggaggggaggggagagagaggagagagaaacccttcttggtgtagctcttgcacaaggcctggtattttctccctcccattggcctagattgggtcagtaggatgggtagattgcgttaaatcaatcattgccccactcctgtagctgagagtggggtcagttacgccaaaatgaagggctgcgagtaggtagggtattggtggtaggagaaggggctggggagtgggggccgggagggtcagtgcagcatgtggtagagccagagctcagcatatctgctcagccgatgccctgggctgccaaagaggctggagaagataggcccatggatcctgcccagcggtctgttatctcggagcagagacttcccctcactgagggttagtgctgcgctatttcaggggctgctgtggactggggttcagtggggttaagcaggcagtatttcacccaccatgggatgcaggtgacatcagtagaaaagcggggtgaacaagcaggttgaaaataagacccaaagtttttgctgggttttcctattggtgagatggagctggtcacctctcttcatgtcacccatggagggagcgagagtgaaatgacttgtgtgaagcgccccagactcctaaattcaaaggcaccagtgatgggggagccgccaccactggagcctgtcattgtgccacatgagcgctctgatgtggatgcccaggcaggggagatgtttcaacagcctcttggctgaggtccagccttggtccaagggttggcgtgattgcaaggagctgctgtggggtttttaggagtggaggaatcgactgctgttcagagtggacccggggagcagacctcctggagagcaagggacagagctgagctgagcaggggagggggacagtgaggattcataggataggcagtgagggtgagtcctgtgacttggaacccagcagtgccaccaaagaccaggccaaaggtttgagcctgcccaggctcatccacagccacagccccagcacctgtgtgtttgctgcaagatgccctgctaggtcttagggcacgtggggcccaggagtggcttctctccagccaggggtcaatggagcctctgtgtgagctcaggacagcaagttacttgttactgctgggatttctgagatttctctgttcaaattctgcactggatctgtatgagcagggctgccctggagagcagacaaagggactcaccagaggggaagctctgagtagagcagagagctgaggacctggagtctagcaaacccgggtcctggtctggctctgcctctgccactcactgggaaagagcctctgagcctgccttttcccatttgtagaatagatccaaaggatcctctctttagggttgttgcaaggatcaaaaaaagtatttgaatatttttgatgtctcttaatgttcttccaccaggtaaactcctctgcatcctttgtgagcctttatctgctcaagccaggcagagtgagtcagcctttttcagagctcccacagtgccttgcccaggcctctctcgtagtacagaccgccacactgcattacagctgagcaacccgggtagtcgtgtatgagtgtgcaggttgtatactgtacaatggtgcctagctgagagatgatggagactgaaatctggcccggactttgcccaccaaggcctggcatgggtgcacccatccagaagaagaggctcctttatctgattggcacaacagctctgtatgggctagcatggactgtggagtcaggcagatctgtatttgaatcctgactctgtggtttactaagtatgagtacccggggaaactactcaccctctccaagcttcagtccccatatttgtaatgtcggaataatacggggtgccaaataactatgatggcacccttttttactgtttttacacttctgtctccacttgtaagctccatgaggcctgggaccatggtcatggactgtgcccagcacagcactgggcatgtgagggacgcaggtggatggtgagtgtgtacccctgctgagccagctcccaccacgggtgctgtgcactcccctgtgcaggtgcatcctcagggactgggagagagacaggtgagagtggccacaaaataatctgacatcgtgatcctgtcttgggctcacaatgtgcaccaggcgcctaaccctggcctacatttacagagctcctgggccattgagaagaactaggtccaagctttgtaggcatggagagaatggggatagagaatggttggaaaaggttcatctgggatggcctgctggagggggcgagctttaagctagattttgactatgagacaacagagctcaggaatgtgaggtggggggaccctatagatggaagttcacaccacctggcctggtctgaacctagatcctccccagccatctgccctctgacagggcctacaacccctgtgccgtggtctggcctggtttacctcaccagcccacagggctcctgccttcgggtttagcctgatgtctactgctgggcctagagtcccaggaatacactgataatccccacaccagcaaacatagggacagctgaggtgtgggcttgggagagccatatctctaggacttctccccgtaagaagggtctacagttggccgtggaaggcaggtgggaggtaacggaggcctcgggaggccaggagtcagcaaggccacctctggtctccgagtcaggctgaccactgggtgaggctgccagagctctacccagtatgtgtcagagaagcttcaggccgctgaggatagagctggtccccaggtggagctctgcagccagtctttgggcttgctgggcattccaggtcctgtgaaggccctcgggagtggtgaccttccccaggcacagcttgggttttggctctgggtgcctctctgcaaacccatctaaccaagggctgcctgcctcttcccaagctagcgtgtctgagggtgctacctcctgctcatcttttgattctcactcagacttcacctactccaggaagccttccttgacctctgacctccctgggactggattgggctccctcttgtgtgctcccacagcaaccatcactctgaactgtgattgctggttactaatctgtcttgagcaccaccgtatccctccctgtgcctggtaatgagcctgacacttagtagttgctcagtaaattgtgatggatggatgatgagtgagtagatgaaggaaggtatagtgaacacaaatacgggctctggagccttactgagtgtgaacttgatggattcctaaagctctcggtgtctcagtttcctaatccaatagaatggggatgttaatagtccttatctaacgggaagactggtgatcatcaaatgagccaaaagacgtgaagggctgagaataataacccctgacacctaacaagaccttggtgaatgttgcttcttattaacaattataggagaaagggaaatgcggggtcaggcctggtgcaaggaacatgctggctgggaagtgggtggggagctccgctgggccccagctctgaccctctccccactccatttcctgcacagatgagcaacaagcgttccaacagcttccgccaagccatcctgcagggcaaccgcaggctaagcagcaaggccctgctggaggagaaggggctgagcctctcgcagcgacttatccgccatgtggcctatgagaccctgccccgggaaattgaccgcaagtggtactatgacagctacacctgctgccccccaccctggttcatgatcacagtcacgctgctggaggcaaggacaagggtggggagggggttgctctgccttggggagtggcgggtatggggagaggagccaagaggatgacacacagatcatgggggaagagggacatttcttttccattgaagggcaatggttgaggatcaaataatagttgtattgcaaatcagactctgttgcggtgcataccagtgttgtaaccgtggactgcaaagagatattccaaagattattacttcaaacaatacttactgcagccaaatccccgtaggaccactaccccccacccaccccaaaacaacagcaataaaaacaatgtcataagttcattgacttgggagatctagccaggctaactcattaaagccagtttatttagttcctccctaggtgggtaatgtggaccagtcatttgctcctttttcccgcctgaaaatcagaaataaccagacctgccttccctctcccaggacacctttatttaaagtgagagaatggctactggtgctttctgaacacaaaagcatcacacaaacacatctgggagggagtgtgaacaggtaaatatgggcttaacatttttaaagaacattctccccttagggaatcctctgtgcctattgttatgctaaattctactgcttatgcaacagaatccaaaggtaccccttgctgcgttggtgcccatgtgtgataaaactcaattcttttgggtcctccactcaacaacctgtgcagcccaccccagctgcagctcctgaatggatgcttggcttcactttgggattttatgatctccgctgtttctcttccaaagccacgggcctaattaccgcctctgcatatgttcttgtaaagttcctgcctaatcaaaagcttcgcggcatccttcttttcttctaagtcagaatatctggtctgcaggccagcattcccctgtttgttgttatggcttcatccaagtacatgttgaagttgcgatttttctgagatattcttggactcgttcttcaagcgcttactgtgctggtctatttattaacttctgtttgaggcccaataataacgagatgccttggaagcaggatttgctaccaggccaccctcatggtattaggtggacagaacggctcctcagagagcccaggagaatacagctaccaggggcctaagccattcccaggctgagcccagaagattttaacccaacacgaattatagcttccttctctaagtgtgtgccgggcagggggctggctctttgtgtatagtttatcacttttaaacctcctggccactctggaagtctaggtatcggtacccatttccagataaagaaactgagggccagagaattcagtttgcccaggttgatcaagaggagcaattttgtgtccagattggttcagatgaacctcagctatgtaaacccgaaccaccaatctagaagaaactgggaagtgatcaaatagctgaaataacgatctcgaagccctggggctacaatgcccaaggcttttgtcttctatacagttctggtaacctggctttcggatttcataatgaatagaaaataggagggacatggtgtaaagcaacaaaggggtccactaccagcaagcaataagaaacagcagccgacagcctggcagtgaaggaagtgacaaaagaaaagtttaaagcagacctgaatcttaaagaaataaaagaattggctgagtgcagtggttcacacctgtaatgccagcactttgggaggtcagggtgggaggatctcttgagcccaggaattcaagatgagtctggacaaaaaagtgagactgtctctacaaaatatcaaaaaattagccaggcatggtggtacatgcctgtggtcctagctacgtgggaggctgtggcaagaggatcgcttcagcccaggaggtcaaggctgtagtgagctgtgtccatgccacatcactccagcctgagtgacagagcgagaccctgtctcaagaaaaaaaaaaaaaaaaaaggaaaagaaatacaagaatttgggggattggccggacgtggtggctcacacctgtaatcccagcactttcaaaggccgaggtgggcggatcacttgaggttaggaatttaagaccagcctggccaacatggtgaaaccctgtctctactaaaaatataaaaattagccaggcatggtggtgggtgcctgtaatcccagctactggggaggctgaggcaggagaattgcttgaacccgggaggcggaggttgcagtgagccaagatcgtgccactgcactccagcctgggcgacagagcaagactccgtctcaaaaaagaaaaaaagaaaaaaaaaaaagaatttaggaccttgagtgtatgagcaaaaacactatcctggccgggcacagtggctcacgcctgtaattccagcaccttgggaggccgaggcgggtgggtcattgaggtcaggatttcaagaccagcctgggcaacgtggtaaaaccccgtctctactaaaaatacaaaaattagtcgtgtatcatggtgggtgcctgtaatcccagctactcaggaggctgagacatgagacttgcctgaactcaggaggcagaggttgcagtgagccgagactgtgccactgcactccagcctgggtgacagaacaagactcttatttcaaaacaaaaacaaacaaaaaatgtcatcttcctggggttgctggagaaacaaatcactcttatagcccagatcaatacctgagatattcctttttttttttttttttttagacagagtctccctctgtcacccaggctggaatgccgtggcgcaatcttggctcactgcaacctccgccggctgggttcaagcaattctcctgcctcagcctcctgagtagctggggttacaggtgcctgccaccacgcccggctaattttcatatttttagtagagacggg[145 bp omitted]gattaagaacacagggacgtaaatgatacattttagaaggagtcccagaaaaaaaaaagagttaaatacccttttagagattaaacaagtatgcttcagtcacgtttgcaaaatcaacttctgtggaatgttggtgagaatgtggagaaattggagcccttgtgcactgttggtgggaaagtaaaatggtgcagctgctatggaaaacagtctggcgttgcctcaaaaaattaaacatagaattaccatatgatccagcaattccacttctgaatatatcccaaaagaattgaaagggactggaagagatattgatacacccatattcataatagcattattcacaatagtcaaaaggtagaagcaacccaagtgtccatcggtagatgaatggagaaacaaaatgtggtctgtgtttatagtggagggctcacgctggtaataccagcactttgtgaggctgaagaaggtggatcacctgaggtcgggagttcgagatagcctggttaacatggtgaaatgctgtctctactaaaaatacaaaaattagctgggcatggtggcacacgtctaatcccagctacttgggaggctgaggc[138 bp omitted]gctcatgcctataatctcagcacttgaggaggcaggaagatcgcttgagcccaggagttcaagaccagccaggaggtagaagttgcaagctgagactgccccactgcattctagccagggcaacagagtgagatcctgtctcaaaaaaaagggggatcattctgacacatgctacacaacatggatgaaccttgaaaatattataccaagtgaaataagccagacacaaaaagacaaatactgtatgattccacttatatgaggtagctagagtagtcaaattcatggagatagaaagtagaatggtggttgccaggggctggagggagggggtggggcgtcattgttcagtgggtacagagtttcagttttgcaaatgaagagttctgtggatggatagtagtgatggtagcgcagcaacatg[132 bp omitted]tgaaaccccatctctactaaaaattcaaaaatcagccaggtgtggtggtgcactcctgtaatcccagatacttgggaggctgaggtaggataatcgcttgaacccgggaggcggaggttgcagtgagccaagactatcattgcactccagcctggacgacagagcaagaccctgtctcaaaaaaaaaaaaacccaaaaaactgattaagatggtaaattttatgtttatttcactatagttatttaagaaatcaagctatgtggaattcgtcatctcccaagtgggtgcgtgagttattactggaattaaagttcaaaatcctccaaatcctttctgcttagcacggaggaagtgtggacaaagagaccccaggaccatgttgcggccatttgacacaaaataagcaaacagaagtgggtgaggggtggttaaaagctcagctgagacaggcacagtggctcacgcctgtaattgtagcactttgggaggccaaggcgggtggatcacctgaggtcaggagttcaagaccagcttgaccaacatggagaaacccagtctctactaaaaaatacaaaattagccaggcgtggtggcacatgcctgtaatcccagctactcaggaggctgaggcaggagaatcgcttgaacccaggaggtggaggttgccgtgaaccgagattgtgccattgcactccagcctggacaacaagagcgaaactccatctcaaaaaaaaaaaaaaaaactcagttgggccctggctgtggggtatccctctttctctgagaaggaaaggtgataacttcctgtagggactcccagtgctagtcagcacaacaggaagtttcctgggcagtgtgcacctagtaacagactctctctcttctgtccaggttgcctttttcctctacaatggggtgtcactaggtcaatttgtactgcaggtaactcatccacgttacttgaagaactccctggtttaccacccacagctgcgagcacaggtttggcgctacctgacatacatcttcatgcatgcagggtgagtacctgtcttcttttgctctgtcaaaagaccctacagaaaaataagtggtcaagatagcctggattgaaatatagtttttagtttatttttatctatttggacataggatttgggatggctgcttgaaactcatttaataccaaaatatacaagtaaattattgagagtgaatgggaaaggggaaaatatataagaaggaaaatgctaaaagccagcagtgagaacagcacacacatacacagcatttgattctatgtacttgctagacgtggcttgaaaatttattctagtgcttcctagtggcttcctagagcttttgctttggccactagagcaaaaagggagtcaagccaccagatttattgtccataactgtgtgtgagtgcctcccagtgtggtctccatatatagagagggtcttcttgaggaactctgacgataattatagtttctgtttatagaaccctgtagcctgttttggggctgcagcacaatcggttctcactggtgcctcccacttcatgataagggcctaccagctggccaggtgaccacccaggtccatatcccttgaagagcagtctggaggcttttatatggtagaagcactttgatgggagaggagagaccccagacaccaggcctctgtggtgtcttctcttctgtagcctctccagagaagtgaaggagctcacagttagcctggggaaaaccgtgggggtgcctggccctggagtgggaactgggaagggggtcactctggccccaatgacgccataattcccattgctcagcagaaagacccacaatggccaagagggagttgtcccatgagcctcccttccccttagcctctaaagcaggtgcaagagctaatcccaaattggctgcacctgcgggggagggtgctttcgggtgaagagacctgaatgaacgcctctgctcaggccaaagaggaccattggtacatgctgcttaccttgtctggcttgccccaggcttcgatcttacagggctaaggagcagcgggatggctgtcatgcttcactcacatccactcatgagccaggggtgacaacagacacgggggcttccctgcccaggcatcccaagccagtggctgcacgtgggttgggactgtctgccttctttccaggactgccccctgacctctcttggtgcctcagggtgaggaaggagaatagccaaagcctccttgctccatcctctgcctcctggagccaaaagcagtgagctgagggcatctgagccctgtcccaggagcttcccaggggatgtcagctcaatttaaatgagacagtgggtgttaaagtgctgtataaagttggaagcacctgattgatttagtaatagtcatgttacagtcttttctggtcacatgcacacagctagatgccccacaattttagcagcaagatgtagtcacaggtagt[135 bp omitted]aacatggtgaaaccccgtctctactgaaaaatacaaaaaaattagccaggcctggtggcaggcgcctgtagtcccacctactcgggaggctgaggcaggagaatggcatgaacccaggaggcagagcttgcagtgagccgagatcacaccaccgcatggatggtgtgagagagactgcctggatgacagaaagagactccatctcaaaaaaaaaaaaaaaagaaaaaagaaaaaaaacagaaaacctgggatcccatatcctagtcctgagggttttggagcagaataggtctcttttttttttttttttttttttgagatggagtctcgttgtgtcacccaggctggagtgcagtggcgcgatcttggctcactgcagccaccacctcctgggttcaagcgattctccttcctcagccccctgagtagctgggactacaggtgcatgccaccactcccagcttatttttgtatttttagtagagatagggtttcaccatattggccaggttggtcttgaactcctgacgttgtgatccgcccacctcagcctcccaaagtgccaggattacaggcttgagccaccgcacctggcctagatctcttcttataccagtaaagagaaacctctcttatgagactttaagggaaagctttgaattattaagttataagatgtatatttaatgcctgcacttgttttgagaacatatttttctttaaacacccgtagctcttttttattttattttattttattttattttattttattttattttattttattttttgagaaggaatctcgctcttttgcccaggctggagtgcaatggtgcgatctcggctcactgcaacctccacctcccaggttcaagctattctcctgcctcagcttcccgagtagctgggattacaggcacctgccagcctcagcttctctagtagctgggagtacaggcacctgccaccatgcctaattttcatatttttagtaaagacggggtttcaccacgctggccaggctggtctcgaactcctgacctcaggtgatccacctgtctgggcctcctgcagtgctaggattacaggcatgagccaccacgcctggctaacatccatagctcttacaaatagagccagaacatggccaggcgcagtggctcatgcctgtaatcccaaaactttgggaggccgaggcgagtggatcacttgaggtcaggagttcgagaccagcctgcctaacatggtgaaaccccatctctactaaaaatacaaaaattagccgggcatggtggcctgtaatcccaactacttgggaggctgagacaggagaatcgcttgaacccaggaggcagaggttgcagtgagctgagatcatgccactgcattccagcctagttgacagagcaacactccatctcaaaaaacaaaacaaaacaaaaacaaacaaacaaaaaacaaagagagccagaatgaccacatggcccagtgaatggagcaggtcaggcagattggagacctgaactgttgtgtcagcgtggccactaactgtggctggtcactatctctgaaccttggtttttcacatgttaactgatggagttgctggatctttttttttttttttttttttttttttttcagagatggtatctcactatgttgcctaggctgatcttgaactcctgggttcaagtggtcctcccaccctggcctctcaaagtgttgggcttacaggtgtgggccactgcgcccagcctagttgctggatcttgactgtggttagtctgtctcactgtgccaagtgaaatgctgccagtcacgcccaggccttgcacatctgttcctgtcccatctggaaggaacactctttccaagatggtctgtctgaattgtcattccttcccctagaccatgagctcctcgcaggcagaggtggtcttgttcattgctggatccctggcatcttgggggatgcaggtgtttgttgaatgaatgaatgaatgaatgaatgaatagatgaatgagtgagtgtggtctctctgtcacaggatagaacacctgggactcaatgtggtgctgcagctgctggtgggggtgcccctggagatggtgcatggagccacccgaattgggcttgtctacgtggccggtgttgtggcaggtaggcaggtaggccccgtgtccacaaaggcacactgccccagggtggggtgggagaccctgtggggcggggcaagccccaggtttccaggacacacagaagatcctcatctccaaggctcctgacttaaccaggctgtcctccaggcacacccacctccctatgaggctggagaacggactgctgcccatagagggaggtgtgtggcaggacgggggaggagagcactggatttgggacaggctggacaaccgactctcggtctcacaccaccatgtggtagctctctgagcttggggaaatttcctaacctcttttggccatgttaagctttaagagggaactaatgagatctgcctgtagggttgccaggagggcagagtgagtgaggcaacagatggaacaacagtgctccgaaaactgcaagggcacagtgagatccccacaggggaatcaaaggggtgagtggagccaggtaccaccctggccacgtagcacctgtccccaaaaagagagctggctgctacccagaccaaccgcagtccccttgcctgacccactgctgacagggagtctgacctaagaggcagtgagccctggctccatctgaaggcatctgggcctccagctgagtgggcacacgtgtggccagtgatcatccttcatggatagtggccagagtgactcccagtgagccttccaccttctgccccctccccagtgggaggtgaggtgggtgaagttagctggggagagcacggatttctgcaggaagcgtctgccagccaggcctctgaacatgaggatctccctcgtgatgtctccaactttattgccggctgtttttttttttttttttaacaaggtttgccgcctcagctcttcagcttgacagctgtgcccaagggagctttgtgtgtatgtttaagtaagatcttaatcctttctgagtggtattaaagttgtcatcaggagagccgggcagcgtcagccttgtaaacaacaggcaggcagggaccctgggagtaactgaagtggtttcagaaatcaaagaggaagggtcccaccccacccacacgaggctggtctgctagtgcatgaacccttggcctgggagattcaccctgcaccatctcctttgctcctgtatgcgctgaggttaaaatcgttggccaccttggtcagcacccctgcaagcccctcccagaatccaaggctcaccacgtccttgaataaagggctaatgagcatctctaagtgccagacttgttcagccacccacacaccccctaatcctgacatctgaggattgatagcctcattttccatacctcaatacccagagacccagatgttaaatagcaaggaacagggaagacattaataacatttgcagttagtattcaattagatgggaatgccaataacctagaagacaaaaataagattcaaatggactcagacctcacccaaaccaggtgacatgcagtggggagacagagtaggtgtcacctccccagtgacaccagtgcagagtgggaagattcaaacagaagcagagctcatcacctgaatgtgagcatgtagggctgtatcattgagcacatggcgtgcactgttctgtctgagtcagtgattaagaccagagggcactctggtcaccacacatgtcattgatctccatgattgagttgattgatctgtctctgctgtctaccctttcctgtcctcccaagctttcctctgagaggtgagccggtttacagccagccagccctagattggacgggtggcacttatcagtgcctaccatatgcaggccgtaattcatccacacagcaacgctacgaggtgggcactgctgctctcccccagcacagatatggaaaccaaggcttagatggctaagtggctcgcccaagaagacacagctagaaagtggtggagctgggcagggtctgacccccaaggctgtgatctcaaccactataatagtatgacgagaaccaaaaggtggtccttgtcctttttgcagttaatttattgtcagaaaccaaggcagaccaggtgcagtagctcacacctgtaatcccaatactttgggaggtcaaggcaggaagatcgcttgagcccaagagttccaggccaagctgagcaacatagggagaccctgtctctacaaaaagttttttaaaaattagctgggcatggtggtgtaggcctgtagtcccaccagctacttgggaggctgatgcaggaggatcgcttgagcccagaagtgcaaggctgcagtgagctgtgataacaccactgcactccagcctgggtgacagagcaagaacctgtctcaaaaaagaaaaaaagaaaaaaaccaaaggagaccttaatagatgtctggcagccttactctctaattccttcccagtgaaagtgtttccaatccacactttgtaatgaggatagctaacctctatggggcatatacatgctccaggcatatgatgaggggtttgcggatgatcgtggatgctatgctcatcactgctgtcctatatggtgggtactaccactcccattttacaggcagcccagggaggtgaaatgacttgcagatttgcttacctgaaaagtactagaactagggaggagcccttcccaagccctgtgcttctttccttttttttttttgattttgagacggagtctcactgtgtcacccaggctggagtgcagtggcatgatctcggctcactgcaacctccgcctcttgcgttcaagcaattctctgcctc[222 bp omitted]gtgaaaatcacttatggctagcaattatatggcacacaatgtaggtattttaaaaaccagtatcttgggccgggcaaagtggctcactcctgtaatcccagcactttgggaggctgaggtgaggggattgcttgtggccagaagtcaagaccagcctgggcaacatagtgagacccccatctctaccaaaaaaaaaaaaatcaatatcaccaatcttatattatagattatatagattactaaccacgtgtgcatccccagggcctagcacagggcttggcacatgttagg[133 bp omitted]aaaccctgtctctactgaaaatacaaaaattagctgggcatgatggcagccacctgtaatcccagctactcaggaagctgaggcaggagaattgcttgaacccaggaggcggtggttgcagtgagcagaaatctcatcattgcaccccagcctgggcaacaagagtgaaactctgcctcaaaaaaaaaaaggaaagatacgtaaataaagttacattacttaaagataaatgttctgccaatttttatttggattttttttaaggccaaagaagatgttgaagaacacctgctttaaaattttctgggctaaaattatcacagctgtaccttatggcaaagttgccagtttatctgtgtgctggcatgacctcagaattttggggtgcaggatacagaatttgtaatcctgatgagaactaaggcccatggtttgcctctgtgcagaggtgtggcatgtcactccagtttgccattctctcctagtcctctgcctccatgacctctgtggaattcatactggtcttatctgcctgtacctgttaggattgttcagagctctggaggggattcctccctggcccacacttcctgcccggggagggcctttattactgtgtttatgtgtacacagccccatgtttgtctttggtctctcccagttgctctagtccaggcctcacctgcagtcacttgaaagtctgcttttttttagttttttggagttttttttgagacgaagtcttgctctgtcatccaggctggagtgtagtggcacgatctcggctcactgcaacctctgcctcccaggttcaagcgattcttgtgcctcagcattccgagtagctggggggctatatgcatgcgccaccatgtccagctaatttttgtatatatatatatatatatatttttttttagtagcaatggggtttcaccatgttggctagattggtctcgaactcctgacctcaggtgatctgcctgcctcagcctcccaaagtgctgggattacataaggggtgagccaccccacctggcccaaaagtctttatatcaccaatgtgggggcaggtggattcaggccgttacctttgaggttccagaatcgggacccgagccgcggcccctggatcttaggccaagactcaggtcactgaatttctgatctggaaggaaccagggaggtcccctccagcactggcaaactgttctctaggccccatccccacttagccagagctgctgcctgtgttctgctccatgggttagggcgtccctgaaaagtttcctttgaagagagttttgctgctcaaaagtcagaaagccttagacctcattttatagacatgaaagaaaaccgaagcccaaagaattcagggactgtgcccaaggtcacacagctagctggccaggccccttccatactcctgccacaatcctacgctgacccctggccctagggtcaggactccgagccatggatagggtgagggaaaggtcagtgtgtgccagcttgaccctcgcaggggcccatccctgcctggggctgccctggggcggctctgccttggtggaccgtgctggggcaggggcgagggagtggactctgggccagtttgtacagacctgctctgagaagagaagccagcctagggaggctggggcttcctctgtccaaaaggtaattaatgaggagcagcttgggcagccagccctcattgtagccctgcaatgcagccttcgaagacagccccaccaggagagcgtgggaaacctttgtcatgcagatcctgctgcctgtttgtttgccaccctgggatttttctttcctgttatatatggctgaccctgtggctaagcagtaaaaaaagcaaaagcaaaagaaagttatctgacaatagatcaatacctaattaaagccagagggaaggcatgaaagatttatagttgccctggaaggggaggaggacttgggagtcctcagttcatgacaggttttttttgtttttgtttttgtttttgagagattacatcccccttgagaccaagaattggttgtggggactctctttcttgaaggagctcagtgagtaggggaggccttgatggaggtgggggcaggggaggtggaggagtttatcagggggctctgctgccaggtccttgggtgctctggttgctgggctgggcccagcctcctcctaagtccgtggatcttgcaccctatacagcctgcagaatttggctttctgcctgtccctcctttctccagcagctaattggctcttgagcccctgggcattttccagtggtaatttctgcacactcacccaggccagccacctctcatcctctgagccctgggctctacctcctagttatttttagtctcccatgtcctcccttggaagacaaagcattgatcacacttaaatgagaccagaacaataaatttcccctcttttctttgctcagcttccctcccaggacaaaagtttgtcatcccccagaccaagcctcgcatacccttcctttcccccagagggtatgacatcatctctctctcttccccatgacttttcaaggacatgtttcctccaaaggagccccactggagagatgctgttggccttttgtgatttagctgggctggaggaagggtggacgtaaccctaagcagttttctagatgctgttgaacagagggagagatggaagaaggtggaggttaacctctgggccagtttggggcgtggctgctagagaggccaagagtgcaggctttggtcaagaacacgggtgggttttgcatcaggcagacccagatgcaaatcctggttccggcacttcctaccaggagactctgggcttagtctcctcatctcaggaatgaggctactggcgcctgcctcagagggctgtcttgaggattgaagggaagaaagtctgtaaaatgtttgcttggtatccgtgtcacctaggtggcagctgtttcttcaataactactgctactatttttgttatggttccagaaccctgacatagcaccatgtcaggcagacattggattgagaggcagataatccaggtagaagtctgaattttactttgggcaggacacttccctctttgagtcaaagaatcaaatggttctttcagccagaaattaatcctctaagaaatgcactggaggcagggctctgtggctcacacctgtaaccccagaactttggaaggctgaggcaagaggattgcttgagtccaggaatttgagaccagcctgggcaacatagtaagactctgtctctactaagaaaaatacaaaaattagctgggcattgtggcgcacgactgtagttccagctacttgggaagctggggcaggaggatcacttgagcccgggggtcaaggctgtagtgagctgatcgtgccactgcactccagcctaagtgacagagttagaccttgtctcaaaaagaaagaaagaaagaaaaggaaaggaaggaagggagggagggagggagagggaggggaggggaggggaatctccctggcaacatggactcaaaggaggaagaggtggagcgtcttgctctggagtcttagcacggagcctgcagaatccaaggcctggggctgggttgggtgagccgagtcccgcactcctgagaattctcgctgtctttctgtactagggtccttggcagtgtctgtggctgacatgaccgctccagtcgtgggctcttctggaggggtgtatgctctcgtctctgcccatctggccaacattgtcatggtgagcacctcccgttctcaatgtgtctttctggccctgtcctctgccatcactgggcctgagtattaatccactggggctggctcaccaaaaaccaggcagacctgacctggagcagagttctcacacactcctcaccctctgcaggcccatttcaaatgagcgccttccagatgcgattcctattttctccagtcacggcttggcctaggaccatgcccatctgccccttctgcctctttcccattcaccaacgttaaagagttaacatttggtaccatcctggctaacgcggtgaaaccccatctctactaaaaatacaaaaaattagccaggcgtggtggcatgcgcctgtagtcccagctactcgggaggctgaggcaggagaatggcatgaacccaggaggtggagcttgcagtgagccgagatcgcgccactgcactccagcctgggggagagagtgagattctttctcaaaaaaaaaaaaaatttggtcactagcatatatggccattggaattgcttatttatcataggttgttaaaaatacaagggctttagagattatctcatcaaaattctcaaataggaaaggaggctgtgagaggttaagtgacttgtccaaagtcacagtcaagtttgtggcaaaatgagggcttaaacccgtatctcctgacaaccattcaagagtcatttcccggccaggcacagtggctcatgcctgtaatcccagcactttgggaggccaaggcaggcggatcatgaggtcaagagatcgagaccatcctggccaacatggtgaaaccccatctctactaaaaaaataccaaaattagctgggcgtggtggcacgctcctgtagtcccagctacttgggaggctgaggcaagagaattgcttgaacccgggaggcggaggttgcagtgagccgagatcgcaccactgcactccagcctgggtgacagagcgagactccgtctcaaaaaaaacagttgttcccctatcccagtctgtcatgggaggggggcaccactccatttctcaccctctgccttttcctgaaaggtagtacagtgtgatagtgaagaacatggtctttggagccagtcagcctaggtctaaatccctgctacactctgggcaaattacttaactgctttgcacctcactttctacatctgtgaaatggaatgggagctgggcacagtggctcaggactgtaatcccagcactttgagaggctgaggtgggcagattgcattgagttcaggagttcaagaccagcccaggcaacatggtgaaactccatctctataaaaaatacaaaaattagctgggcacggtggtgcatggctatagtcccagctactccagaggctgtggctggagaatcagttgagcctgggaagcagaggttacagtgagcagagattgcaccactgcacaccagcctgggaaacagagtgagaccctgtctcaatttaaagaaaagaaaagaaaagtaatagaatgacatacagtaaatgaaataaagtgcaaataaccacctatataaatgtaaatttaatttccttctcctgacagaagaggccaggatggggtcagactagacaaagccttgaaggccagaaattgggatctgatagtcttagaggatatcaaaatcctttttttggaggcggtctgaagtctgaaggctgatggaggagtcagtggctaaccctgcccgatccctctgctggcctgggagcctccgggtcttacttgtctatttcccagtacctggcatatggctgggagcatggtagatggtgcccactagattttagtgaatgaaggaaggaaggcatagcttttctttggggtcctcctgttctcacccactcctccatcagtgtcttcgcccacgtggcagatgtttgaatgctcaatgatcacagtgcacagggcttggcgttcctgaattatcccatgtttttcttccttatcaatctctctgtcacccaccctgctcccaaccctgtcccttttgttctcatcaaaatgcccattgtacattgagcaagagaagaaagagcacaagagggaggggaaaagaaaggaagagagggggagagatagacagacactgagtacctgcctatacttgctactggcctgaattttggcaccttcaggtgagtgctcagagagaggctgcgggtgttgggaaacgtggaacggtgagcctctcagtgtgtgtgtgcaggtgtgtttgcacatgcacacacttcagtttgttgaaaacctgagtgcatgggctgcctcccatggcccttttaaatgggtcattctgtatcagtgccacatctttccccagacacagcttttcctctgaattctgcctcctccactcccccctccccctgccccaattcctttcagtaggggaaggaaatgctaacctcctccctcccattccgcccaagacttgtatgtgtgtaggggtggtgaacaagctcaactgaaagagaacacagggaggaagaagcacgctggcattcataacgatgccctgttcccaccctcttccccacctcatgggaaacagccctgatggcccagaagttcccatggtgaaggcagaccactgaaggaccatggagtagggcacgtttgtcgagagaggtgtgagagcagttttgttccagttgatgcttctctctgtcaagtagcccatggcctgccgctgtggagatgagcagcctcatctgagagccccgtgccttccagaagcaaacggctttccttggccaactgggagctgtgcagtccccagagcatgacacatggggagcccttctccaggaggttgtgtgggttgggcgcgctggctcacacctgtaatcccagcactttgggaggtcaacacaggcagatcacttaagcccaggagttcaagaccagcctgggcaacatctctacccacctctaccaaaaatacaaaaaattatcctggtgtggtgtcatgcacctgtggttccagctactctggaggctgaggtgagatcacctgtggttccagctactctggaggctggctgagatcacctgagccagagaggcagcgggcagtgagctgagattgcatcactgcactccagccagggcaacagagtgaagccctgtctcaaaaaaaagaaagaaagaaagttatgtggtgtttattgacgatgaaagaaaactcatcgtctcattaaaaaggctggtttctctttgtcaagaggctacctttactcaaattagttcagtgctaagcagttca[164 bp omitted]ccaaaattagccaggtgtggtggtacgtgcctataatcccagctactcaggaagctgaggcagtagaatcacttgaacctaggaggcagaggttgcagtgagccgagatcacaccattgcactctagcctgggtgacagagagagagagaccctgtctcaaaaaaaaattgccctttctatgggccatcagcatttgaatattggcaaattcatatcgttctacctaatagatatactattgttttcagcttcaaaatgaaggtttggagtgtgtgtgtgtgtgtgtgtgtgtgtgtgtgtgtgtgagatacacagtaaagtacctcatcagaactaaaagtagaaaaagcatggacttgggctgggcgcggtggctcacgcctgtaatcccggcactttgggagggcgaggcaggcggatcaactgaggttgggagtttgcgaccagcctgaccaacatggagaaaccccgtctctactaaaaatacaaaattagctgggtgtggtggtgcatacctgtaatcccagctactcgggaggctgaggcaggagaattgtttgaacccaggaggtggaggttgtggtgagccgagatcacgccattgcactccaacctgggcaacaagagcgaaactctgtctcaaaaaagaaaagaaaaagcatggacttgagagaaaatccacatttgagtaccaatgtcaccatcttaatagctatgagtctattactcaacttcttggagccccagttgtctcatcggtaatcccatcttcacaaaacagttgtttgggagatgaaaaaatggacaaaat[132 bp omitted]ccacaacctccacctcctgggttcaagcgatcctcttgcctcagccccccgagtagctgggaccacgggctcgtgccaccatgcctagctaaccatgttgcccaggctggtctcgaactcctgaactcaagtgatccacccacctcagcctcccaaaatgctgggattacaggcgtgagccaccatgccccgccaagacttcttattttaaacactagaaatatacagatacacctaattgaataatttattaattgcctcctgctggccagagttccattttttaatctacaagatatttacttacacttcgctctgtatgattgatgttttcccaaaatgtttgaggtctgaattttcacaaactgaaccacattgtcaaagcacaagggaagatggttgcctaacagacactaaagatttctgttataaagtttactttattggccgggcgtggtggctcatgcctgtaatccctgcactttgggaggccgaggtgggcagatcacgaggtcaggagatcaagaccatcctggctaatacgtgaaaccccatatctactaaaaaatacaaaaaactggctggtgcggtggctcatgcctgtaatctcagcactttgggaggctgaggcaggcggatcacaaggtcaggagttcgagaccagcctggccaatatggtgaaaccccatctcaactaaaaatacaaaaattaggtgggcgtggtggcaggtgcctgtagtcccagctactcagaaggctgaggcagaagaatcgcttgaactcgggaggcggaggttgcagtgagccaagatcgtgccactgcactccagcctgggcgacagatagagactccgtctaaaaaaaatatatatataaaaaattagccaggcgtggtggcgggcacctgtggtcccagctactcaggatgctgaggcaggagaatggcttgaaactgggaggcagagcttgcagtgagccgagatcacaccactgcacttcagcctgggcgacagagtcaggctccatctcaaaaaaaaaaaaaaaaaaaaggtttactttattaaggaaaaatatttttgtaggacaaagaatcaactccctaatttatctgcgtcatactttcacattccctgtgttgggttttcttgaagtcatttcacaagaaaccgtttctaccagggatagatatagaaagctgtattggaatggaagctccctgcctggctttcagcctctgcactcttaacccgtttgggtgagcaagatgctgaggggactggttaccaacttgttcgctgtgggtgagtactatctcactctttgaggctctgggagaatgaaattaaagggcctgcaaaaggtttgtattccccaaagatctgcaggctttccagcttttatagcagcagcagtgctggctgcatgtgagattttttttcttctctcccgttgtttcagtgcactgattttattggcgggaatattggattagggaagtaaggcagctggttggaagcggggactctctagtttaacccctcggctgctgggaggcaggtcatatttactggcgttttttcgctccatttgtgggcagctgggacagacggcccaggcacatggaatgtgacctctgaagtgtgggtggacagagccctggaccaggagcccagtcagctcaccattcactcactgtgaccttgaaccagccctcctgaatcctcagtttcttcttccctaaagtgtgcggcagagggatggactggatcagcttggcaagctccagggctttcagggtccaggcagatgttgtaaactcataaagcgggcctgggaggtgctgtggcaaaactggagtcattcagattcagattttttcaagccactctgcagggcaaactccccgtctttgtctcaggtcaagatactgtcacacatttagatgatgcctactgtgtgccaggcagtggtcttagtgctttacatatattaattcatttcattctcacaaccacctgatgaggtggggaactgagataaggggcagttgttatctcaaattcacaaatgaaaatgacagagaagaaggaattctgagccaccccactgatggccaaccaggccaaaaataaggatggcgcatttaacatctatcccagatagggcccaggaggggcatggaggctggagacctcagataaaggagagagctgtccatacattctaacttactttgcctgatattatcactcaggacatagtgaaagagacactgtcttcagataagatattcacttaggccaggcttggtggctcacgccctacaatcccagcactttgggaggccgaggaaggtgaattgctcgagcccaggagttctgaaccagcctgggcaacatagggagaccccatctctacaaaaatttaaaaattagccgggtgtggtacagtgtgcctacagtcccagctagttgggaggctgaggtgggaggatcacttgagcccagaaggtcaaggctgcagtgagtcgtgatcatgccacttcactccagcctgggcaatagagtaagaccctgtctcaaaaggaaaaaaaagaaaaataataagatatttactcagagggggccgagcacaaatggctcatgcctgtaatcccagcactttttgttttgttgttgttttgagacagagtctcaccctttgcccaggctggagtacagtggcgcaatatcgtctcactgcagcctccacctcccaggttcaagcaattcttgtgcctcagcctccagagtagctggggttacaggcatgtaccaccacacccagctaatttttttatatgtttagtagagatggggttttgctgtttgccaggctggtcttgagctcctggcctcaagtgatccgcctgcgtcagcctcccaaagtgctgggattacaggcctgagccaccacacctggcctgttgtttttgagaaagggtctcactctgttgtccaggccagagtgtgctggtgcaatttcagctcactgcaacctccacctcctgggctcaagcgatcatcccacctcagcctcctgagtagctggcactacaagtgcacaccaccacgcccagctaattttttatagaggcagggtttcgccatgttgcccatgctggtctcgaactctcaggctcaagcattcc[133 bp omitted]aagttccatatctacaaaaaataaaaaatttagccaggtgtggtggcacatgcccataatcctagctacctgggaagctggggcaggaggattacttgagcccaggagtttgaggctgcagtgagctatgattgcattgctgcattccagcctggttggcagagtgaaaccctgtctcttaaaaagtcttctgtacttttgcttttaattgtgataaatgtacataccataaaatgtaccatcttaaagtatacagttacattttaaatgtacagttcaatggcattaagtacattcatacattcacattgtacaatcatcgccatctgtctccagaactcttttcatcttacaaaactgaaactctgtacccactaaacaatgactccccaccccctcctccctccagcccctggcaaccaccattctactttctgtctccatgaatttaattactctatacttcatctaagtggaatcatacagtatttagctttctgtgactgccttatttcacttagcgtaaggtcctccaggtttattcatgctgtaacatgggtcagaattccctcccttttttttttttttttttttttttgagacgagtctcactctgtcgtccaggctggagtgcagtggtgtgatctcggctcactgcaagctctgcctcccgagttcacgccattcacctgcctcaacctccagagtagctgggactacaggcacctgccaccatgcccagctaatttttttgtatttttagtagagacgggatttcaccatgttagccaggatggtctcgatctcctttgactttctgatctgtccgactcggcctcccaaagtgctgggattataggcgtgagccaccgccttttaaaggctgaattgtattccattgtatgtatatatcagcaggtgacaacgttatcctgccatctgcttcttagcttggaacatgaagattagtgaagattagactttctacctaaaaagggaaggcaggtggctcacctcaccttctgtgaagaaggggtggccggtcagtgaggaagagtcagggaagggaggaggtgggcaagaaaccaaatatatagacatatgtatgtatatttcatgtatccatccatccatagacactggggtggcttccgtgtcttgcctatggtgaataatgctgctatgaacatgggtatcgcttttttttatttttattttttttgagacggagtctggctcaagtaatccacccgcctcagcctcccaaagtgctgggattacaggcatgagccaccgcgcccagccgggtatcacctttaagggagaattgaaatccatggaggggacattatagggaaggaaagcctggcaaacaacagcaagaagaaccgttaggggtgagagcccttcccagggctcccagggagacagggagcaccccatcacgtgggctggagggccatcttgttggctacttggcagtgggtgtccgcctttgggaagagatgtcccattagatgattcccaagtttcctcccatcctagggtttcagcttgaagagggggctgcggtgcccaccatctgctaactgagccagctcagattgggtcgctagattcaggggagggcactgactcctgttttcttcctcgtctcctggcaaggctcctctgtgggcagacaccagcagatgacaccgatatcctgccatctgcttcctagcatggaacatgtcggcaagcgaagacaggctttccacctaaagcgggaccgcaggtggcccacacttcactttctgtgaagaaggggttgctggtcagtgaggaaggatggggagaagggaggaggtgggcaagaactgaaggctgtgaggatttccccctctttggcatgtgctctgtgtcctgcttgcttgactgaagtgttcatagatgttagtgtccatgccagtgttcagggcctctgtaaagttacacggatgttcctgcaacctcaaagaagtgccacacgtgcccccgagctgggcctgggccaggcagcaaaggcagattgggtggtgggaggaaaccaaagtcccctggttgtgccctccttccctggggcttatgtgttccaggaagattccgggcttatttctgtgcacgcgcacctctgtataaatggaatagtgctttgaatgcactgcaggagtgcctctcaaaggaatcctgtggtgaagtcttttgtaaagtgaaaagtccttttgtaaagcgaataattgtactgtttatctgctttggaggttccgagttttccaagattctcaggggagagagggagttgtttgaaggccacctggcccaccccctctccagtatctgattctcctctggagcatcctttccgagtgatgtgaaacccccgatggttgggaaactcacgaagcctgcaagacggaccattctatctctggagagctctgcttactagaaatggaaacttactctgagctaaaaagtctctctctgaagttttcatccattgcatcttctgcttgcaggttacactgaattgaatgtgccctttccttgtgttgactcatttgatatttgacaacaatgaacttgacccctcagtcccctcttttttgagctaaaagatcctggcttccccattcattcctcatttgcaggattttgagctcttttatcatcctggtggttctgtcttgactttgcttggttggctgtcctgcatcctttgcaaccgtggagctcagcaatgaatgcagctctgagatgttctctgtccacgttgaggagacagggcctctcctcttcctagatctggagtcccttcctcttgttagtccagctcaagaactcttatgacgggagtaaacttgctgttgcctaaaatctcaaagccatgtggtgtgttctgctactaagccacaaccctctcattcaggacttcacggagatccttattttaatgtcaggttttcttaagcaagacacaccggcagaagagtggtctaatctggaactgactgagctctcctttttccctagaactggtcaggcatgaagtgccagttcaagctgctgcggatggctgtggcccttatctgtagtaagtactgatggggcgctggggaaccaaagcctggcaccagggcctgaggttcaaagatggcacagttcctgcccttcacgggcttatggtcaagaaaaaaaaagtgggacatgtcaatggttagcaaaaaagtagggatattgtgagagctgtctgtcctgctgtgctgcttcgtaaccattcatcttttatttatttatctatttttaaaaattatattttcatctttttttttgagacagggtgtctccctgtgtcatccaggctgcagtgcagtggcacaatcatagctcactgcagcatcagactcctgcctgggctccggtgatcctccctcttcagcctcccaaatagctgggactacacatgtgtgggtccatgcctggctgtttaaaatttttggcagagatgggggtcttgccatgttgcccaggctggtgttgaactcctgggctcaagcaatcctcctgccttggcctctcaagttgctgggattacaggtgtgagtcaccacgcctggccttttattttattttattttatattttattttatttttattttattttatttattttattttattttatttttgagatggagcctccccctgtcacccaggctagagtgcagtggtgtgatctcggctcaccacaacctccacctcccgggttcaagtgattctcctgtctcagccccccaagtagctaggattacaggcacgtgccaccacgcccagctacttttttgtattttttgtaaagacggggtttcaccatgttggccaggctggtctcaaactcctgacctcaggtgatctgcccgccttggcctcccaaagtgctgggattacaggcatgagccaccatgcctggccccagcctattttttcatctttttattgacatataatatgcaaacagaaaagtgcttaaggaccagcacccagatcaagacaaataacttcctaacctttttggtcatggaactgatcctttgagatcccttgttgaaagtccaagaccctgtcgccagaaaaatacatatatgtgcactcatgtgcatacacacatatatcaaaagctgcagttttagcaggttcgcaaactgtaactagtccaagaacctctaggaacaagatgtcttcagggccctagttgggagagctcagttctacctacagaggtcattctgagtgttagaggcaagcaggtgtccaccaagtaaacatggtgtaagaggacatttcaggcaaagctgcagcctgaactaacatatagatgggtgaagggtcatggccagcgagttggttagcaaaaccaagaaattcgttttgggattgtgtgtgattttgatcagagataaagttagtgaaatagtatgagtcagattgttaagggctttaaatgctaagaaaagaaaatgtacttcactttgcgttccctgggatcccactggagggctttcaacaagagagttattgatggataaccagagttttagaaaaccagtcaggctgcagtgtggagaatagattgtggggacaagggggataagaccaaagaccaaaggccaaagggctctttctgagattgaaagagatgagtctgaacagaagcaatggaggtaggggtcgggcagtgtggctgacgcctgtaatcccagcactttgggaggccaaggtgggaggatcgcttgagcccaggagtttaagaccagccttggcaatatagcaagaccttgtctctacaaaaaaaaaaaaaatacaaaaaaattagcccggcatggtggcttgcgcctgtagtcctagctacttagactgaggcaggaagatctcttgagcctaggagttcaataccagcctgggcgacagagcaagaccctgtctccacacacacacacacaaaaattaaaaattagccaggcatggtggcttatgcctatagtcctagcccaggagcttgaggcagcagtgagctatgatcatgccactgcacttcagcctgtgtgacagagcgagaccttgccttaaaaaaaaaaaaaagaaaagaaaagaaaaggccaggcgcagtggctcacgcctgtactcccagcactttgagaggccaaagcgagtagatcacctgaggtcaggaattcgagaccagcctgaccaacatgctgaaacaaaaacaaacaaacaaaaaaaccaatgaggatagaagagggagtgaacgcattttctcatccagtcctccaaacccacctagaaagggtattattattagcttaatttataggtagaaactccaggctcagagagttaggttcctagcccaaggtcacccagctaagaagtgatagagccagaattcagagccagcctgtgccatttcaaatgtcccacatgttagccaagctagacagtaagcacctgggctttctctgggtcagctacctgctgtgtaggtaagaggaagactgagtctgaacaaacctgggatggagggtcaggtctgggagggctccacttcaattcacggagggtcaggcctgggaaggctccgcttcaattcacgtccaccttccttacttcttaccccatggctttcaagaaatcaggtctgcccctgaccctctgtgggtctctctggatctgtttcctggatggggctggagaatctctcatcccaggaaggaacttccagccttaaaacctgaggactccttgagtcagggtattagggtgcagtggggtggcagtgggtgtgtcatagcttctgcgtctgcttaggctctgagtttgttcgtttttgaggaaggaaagagaagcacgagt[209 bp omitted]gaggcaggagaatggcgtgaacccgggaggcggagcttgcagtgagccgagatcgcgccactgcactccagcctgggcaatagagcgagattccgtctcaaaaaaaaaaaaaaaaaaaaaaatccaaccgtaagcatcataaaaactaaaatgctgtatcggagttggagaccatcatctttcatacctcctttatcaaaccctggacctggggagccaaggctggaaggctgtcccagggcaggagtgggagtgcggagggcggagggtcagtccctggatgcgccttttctgccatctatcggccatccttggagttgcagggctcagcccagaaggctgggcaaccccaagggaaatgaaggtccctggaggttctggcaccccctgcagtggttagggtggagagaagtgccctggctcattaactggtagctaaataggtataaaattcccctcaaagggctttatttcagtgtcaaatttgccttggtttttctcatctgtaaaatgggaataagaatatctaccctcagtgttcttttggtagtggataatgggatggcagtttcctagcgcccatccccacttgactggctgacccaagaagttcacacaagaagcgtggattggtgatcaggatgaaggcatcttagaatctgttacaggtctgggtgtggtggctcatgcctataatcctagcactgtgggaggctgaggcaggaaactcacttgagcccaggagttcaggcctgagcaacatagtaagacctcatctctacaaaaaaaaaaattttttttttaattacccagatgtggtggtgggtgcctgtagtcccagctacttgggaggctgagatggatcacctgagcccgggaggttgaggctgaagtgagctgtgatggtgccgctgtactcccgcctagagtgagacctgtgtcaacaagaacaacaaaaagaatctgttaaggggtcaattcagcagtttgttggggtcagggttttctttttttgtttgtttttgagacagtcttgctctgtcgccccagctgcagcgcagtagtgcaatctcagctcactgcaacctccacctcctgggttcaagcaattctgcctcagcctcctgagtagctgggattacgggagcccaccaccacacccagctaatgtttgtatttttagtaga[133 bp omitted]aggtcttgcgtgactccccgggctaaagaatttccctccttaaaacaggcattgcttttaatcacctgtttccccccatagatgtctctcttcctgaaattatctcatgtatgtaattgcttactggtttattgctagaccctgtaagctctgggagaacagagatttgcctgcctccttcactactgtgtccccagtgcagagaatggtgcttggcctaatagggaatgaattcatgggtgggtgatgaagtgaaggccctcagcccctgctcagggccctcctgtgacatctctctgcttcctccccttgcagtgagcatggagtttgggcgggccgtgtggctccgcttccacccgtcggcctatcccccgtgccctcacccaagctttgtggcgcacttgggtggcgtggccgtgggcatcaccctgggcgtggtggtcctgaggaactacgagcagaggctccaggaccagtcactgtggtggatttttgtggccatgtacaccgtcttcgtgctgttcgctgtcttctggaacatctttgcctacaccctgctggacttaaagctgccgcctcccccctgagggctggaggcccaaggtcggggaggggagggaaaagcagcacccacagggagcgcctgcgaggtttcttctcatcaccagctcagctaggccgggcagacaaggacagaagactctgggccactgtaatgtttgtgtttagatttggacacacagtggagacccttttctgaaaggcatctggcggaggagttgatgtggctgctgtcgtttttctcggctgctctgatgacatcgggccagggtgaaggtctggggtggggtgtgagagtggccctccctcacctgggctgggcttcttccatggggccagggggtgccccctcactgctgcggattgagcagcagcttcttcctcctcctctaccctcagagaccctaagagacatgggaaggctcgaaggttgttgcgtccaggcatggcccctctctagctcagaaataattgcaggccatgtggtgtctccttgacacctgctgtgtctggggctccagtaagaagagggcctactggacatgtcagctgtgacctggctgaaaccagggtgccctcctgggctggttggtgtgcaccggggcatgatctgttgtgcctgggttgggcagagcagggagcctgtaggctctaggacccctcttgtgctgggggtacccagtgagagggacccatgcagggggaataaacttcattccaagttccaccctggagaagacagacccaggaccagcttcagacttctccctccctttcttccaggatattggcatctcacacgggtgccccagcctccatgcccagccttgttttagggtctttttctttccttttgctgccctgacactactttgtgcctctctttggttatggagacagtgttttgaaacattcatgcgtgtgtgtgtgtgtgtgcgtatatgtgtgtatgtgatgggaaaggtaactgaggcacgacagcgcctgcagagaaggcatggaggatgcagggggcccatgtgggcatccgtgagaggtggcagaccgtggtgtgctgtggttgctgaatgtccttgctttgacaaagcctgcccccttccttcccatctcctgtcccttccacacctgcccctgagcatcactgaccggtggcagaatggccctgctggagggagagctcaagccctccaaggatccctggatgctgaggtttgccaggttcagctcttgtttccgtctgagatggccttcatatccaaaaaggttccatcctatctcccttaggagagaaagagctttgggggcgcaagagaggctggggtaggaatgttgaggccatgtgtccatttaagttagggggacaggaggctacaggaagaggaattccagtttagttggaaaactttgcctcaggagaattgttgggtgcatggatgaacctcagagggagggcagccagtagcctcggaggcttggatgcgggagagaacatggtggttatcaaatccaccccaccccattacacaggtgagaaaacaagatggagggaatgaccctcctaacaggagctggtgcaggccccgaatggagggcatgaggatgacctttgacaaaagatgacactccctttatcgtgctcttggaattctcaaccactgacagcccagaagaacaaagaacgccaggcctgggaggaggcaggggggctgggcgtgtccagaaacaggggcaggagtgtgggaacggtcttcctccagcctggtgcccatcctggcccttgagtgtagcagggtccagggtcagtcaggccaggcatttggggtcttgggccacagtggcttcccatcctggtgactacatgtaaatgggctcactcactcactggcaggcgaggcccagccataccgcatcttggcccactgctaaatagattgccctggcctcatccacatatgtagttccctaggtcctgctcccctgcaccagtgccatgctgagggccgcagcctgtggcactgtgggcccacgcctttggcggtgttgcgtcagcctggggcgtcttgtgtgtgccctgcccaccgttctctgccctagtgatagaaagatgtagatggaagtcagtgcctcagaggaggaggctctgaggctgtggagctgggctcagggaagaccaggggaggatgcagaaggagtcaggacattgctgcctctgcctgggctgcagccgcactaagctgagcgatgaggtcctttcctggagggatggagaatcccctccagattcctgtcctggcccctggggattctgtggtgtgggtggaatgagcagagtgccacctctgtctggtatgacctggagagggggcttcctctcttaggggtgagaaagcattgaactagaagattctagaaatccctcatagaagcactcagctccctcggggactcccagggaagcttgttactgagaaggacagtggaggcggaatcgtgtctcccaccatgttaagtgtgtcctctgctgccaaggaccctcgtctacaccttagaccaccagccccagctgttctctgtcagcacacccacctccatcccctctcccaaccatgacttccaagcggggccacagggtggggtcatagggtcacttcacctgacccaggcctctccccaggtcaggaggcagctgtctggtcagaggggttctctttgtggcatctggctttctcctcagcaggtcccaccaccctctcagcagcacttccccatggccaaggctggccgtgtcctctgtgcctctttccttgtctgaggtggctgccagcccagggggtggtgtgtaaatcttcaggctggtggaggtaggttggccttttatccacaggatacagaaactgaaagctggggaatccccaaacagcagccatagactcactggctctcattaaacgggagaggaatcacagaaactggggaagggaaaacaaaccttcaaaggagaaatttcgctttaatgacaccattcatcattcgttttttaattaggaaaagctccctaatgaggctcttttgccagctaataggactctcgatttccatgagaaccattcttgcccagaggattaggggagctgttgctcaccacaccaggatcttcccccagcgtccaatttaatttgcaaatacgtaatgcagattccctgggtgccgtgaaagcctttcctggcatcattcatgttgctccccgtgctggctggaaagcacggttctcctctgccttaaaaacagtgcccaacagtgaactgcccctccgaggacttgagtaagtggaaaaaacaaaacacagactgcaatgtttgtttctaagtatttttgtattgtgtacattctgtatatttttgttgtaacatattatttgagcacagattccattaaatattttttttctttttccaagccattggttattcaggaagtgacctgaagggctggcattagggcctgtttcatctgggtctgggtcaggatgggtgggagagggtgaacagcagcggtggtggatccaggatttctataaaatacagattggggcatcagtgcttagcaccagtctgtagctgtgtgcatcttacttaacttttctcaaatcactgaactcttttgagtggttga[144 bp omitted]aaactccgtctatactaaaaatacaaaaaattagctgggtgtggtggcgcacgcctgtaatcccagctactcaggaggctaaggcaagagaatcgcttgaaccatggaggcagaggttgcagtgagccgatattgcaccactgcactccagcgtggtaacagagt[132 bp omitted]acacagttaaatcccgtctctactaaaaatgcaaaaattaactgggcgctgtgatgggcacctgtaatcccagctactcgggaggctgaggcaggagaatcgcttgaaccctggaggcgaaggttgcagtgagccgagatcatgccactaaactccagcctgggcgacagaactagactctgtctcaaaataaaaaaaaaaaaaaaaaaggaaaagaaaagaaaatttaaatgctgcagaatctatccaagaacaaactttagagtgccattaaggctaaaggccaaagaacccacttctgtttacagtgtggagatccaacttccctagaaggagaaatcaggatcctctctgagcatcagtgctcttataggtcaacttcaggctaaagtacctgagccatttaaaggcaagctcctgccaggcgcagtagctcatgcctgtaatcccagcactttgggaggctgaggcaggcagatcacttgaggccagaagttcgagaccagcctggccaacatgaaaaaaccacatctctactaataatacaaaaaaactgccaggcgcagtggctcacgcctgtaatcccaatactttgggaggctgaggcgggcagatcacgaggtcaggagttccagaccagcctgaccaacatggtgaaaccctgtctctactaaaaatacaaaaattagctgggcggtagtggtgcgtgcctgtagtcccagctacttgggaggctgaggcagaattgcttgagcctgggaggcaggggttgcagtgagccaagatcctgccacagcactccagtctgggtgacagagtggaccctgtctcaataaataaataaataaataaataaataaataaataaataaataataaaggcaagctccttggagagccagaagctgttgaattctctgcctttgccttctctccctttttcactttcctggttcttcccttctattaatactagattttcattcttccacacattaataaggcactt[132 bp omitted]aaaaccccgtctatactaaaaataaaaaattagccaagcatggtggtgcatgcctgtagtcccagctactcaggaggctgaggcaggagaatcacttgaacccaggaggcagaggttgcagtgagccgagattgcgccattgcactccagcctgggcaacaagagcgaaactccatctcaaaaaagaaacaaacaaacaaaaaaaacaggtgcagtggctcatgcctgtaatcctagcactttgggaggctgaggtgggtggatcacctgaggtcgggtgttcgaaactagcctgaccaacgtggggaaaccctgtctctactagaactacaaaattagccaggagtggtagcacgtgcctgtaattccagctacttgggaggctgaggcaggagaatcgcttgaacctgggaggtggaggttgcagtgagccgaattcgtgccattgcactccagcctgggcaacgagagtgaaactccgtctcaaaagaaaaaaagaaatgaagacgatttcctgtgtacctactatgtgctaggcactgaggtaggcatttccacagctactttatgtgaactaggtataaatatccccctatttatacacaagggaaaaggttagagaaatttagttacttgctggtagtatgtggcacagctggcttcacacccaagactggtggtaccaaagttcatgctgtcagccctcaggtatttgcacaggactgtaagggcactaagcatgtgcaggcctcagggtctttgtttaaagatccatctcattgcattaggcctggggccatccagtaacaggaatgaacctcgggacattcactcagagttcatgtaataggaccttcaccttatcagccctcatagtagtttacaagaaaaaccacagctgtcgattcattactgcttccatatatatgtattttttctcttgttgcccaggctggagtgcaatgatgtgatctcggctcaccgcaacctccacctcccaggttcgagcaattatcctgcctcagcctcccgagtagctgggattacaggcacgtgccaccatgcctggctaattttgtatttttagtagagatggggtttctccatgttggccaggctggtctcgaactcccgacctcaggtgatctgctcgcctcagcctcccaaagtgctgggattacaggcatgagccaccgtgcctggcctatttctttatatttgagagagggtcttgctctgttgcccaggttggagtgtagtggtagtcatagctcagttactttgagctcctgggctcaagcgatcttccagcctcagcctcctgagtagctgggactataggcacataccaccaggtcctgctaattttattttttgtagagatggcatttcactgtgttgccaggctggtcttgaactcttaggctcatgcagtcctcctgccttggcctctcaaagtgctgggattacaggcctgagccaccacatccagccacatttaggaactttagcaattaagagaactggactgccctctcagacctccaagtggaaagacttcattgaagtcagcagggtttccattaagtgagaagacacactgttaggaaagtgtggtcctagtaactgcatcttatttccaagaagcccgcaggctttcctggcacctggtctaagggatcctctggtagaggacaggcattctgtcatggtgaataatgaatgagagtgaaaggaagtaacttgggttattgagttctatgagtataactctactggacaatgaataaaacattgtgagggaaattgctcttagattctgcttgatgcctcctgcaagaagcagaaaggtgtgtatcccagcaagtgatttgatcttcttcaacaaattccttagtatagcaagtataatttcctcacaaccttgttgggaatacaaatgttaggcttgaggactgagctcattaaacaaaaacaactgtcttgatgagaagctaagttttattattataattacaaattaattacagagaaactgaagccattcttcatacatgacaaacatacatttcctctgtgtgtacagcacacaagtaatatacacaaatatattccatgtctgaacaaatcctttttaaaactttaaaagctggctgggcacagtggctcacgcctgtaatcccggcactttgggaggcc[134 bp omitted]gaggaaggagaatcacttgaacctgggaggcagaggttgcagtgagccaagattgcaccaccacactccagcctgggtgacagagcgagattctgtcttaaaaaataaaacaaaaacaaaaaaaaaaacaactttaaaagccaagatagtagcttattaaaatttgaatacagtacatgtttctagtcatgaactctgtggtttcttctcatgaccaagatattcagttccatgacaccattttccttgtctacagtagtgatacagagtttgtcagactttttttttttttttgagacggagtctcgctctgtcgcccaggcttgagtgcagtggtgtgatctcgactcactgcaagctccgcctcccgggttcacgccattctcctgcctcagcctcccgagtagctggaactacagacgcctgccac[131 bp omitted]caccacacccagcccagacttactttttttaaaataagactaccagaggccgggtgcagtggctcagtttgggaggccaaggtgggaggattgcttgagtccaagagtttaagaccagtctgagcaacatagtgagaccccatttcattaaaaaaaaaaaaagataaaataagactatcatatagagctgtgtaatgtagtgagcctacattacaaaaatatatacaaccacacagagaatatgtaattacaccttgcctatatccataaatgatttgaagcaggtaacacatttgcttttaaatgccatttacaacatagactcttgaatgacatgaatttgaaaatgaagtattttttcagacttaaaacgttgatgtgctaatgtagcttactttaaaaaatgatttccaagtggggaaccaactacattgggaaaagacagtcagattcaaggacagtgtcataaaattgctggttttccttagtcaccctgactttatttttttgagacagagtctcgctctgtcactcaggttggaatgcagtggcgcgatctcggctcaccgcaatctctgcctcccgggttcaagcgattctcctgcctcagcctcccaagtagctgggactacaggcacatgccacagttcccagctaatttttgtaattttagtagagacagggtttcaccatattggtcaggctggtctggaactcctgacctcaggtgatccacctgcctcggcctctcaaagtgctgggattacaggcatgagccatcgtgcccagccactctcactttaatactatgaaaaatgctacttagatttttttctatactgcctacattccaagttattaaagtttaaaaccgtatgaaagcatttatgaagattctgaattgtatttctcattaaaagaaaagaaatgtgagtcatgtcccgaggcttatgtagaggagaaagcagaaggccattgtcagtcattttgaaagttaaaactcagcacttaatgtgaatttagatccatttaagagaggattcctcagttttatgggtttgtgctcctctgagcatcctcagggaagtgagaacacaagacttctgttcttctaagcaaaaatcattatcaaatgaatttattaaagagctatcccgagcaaattgcaattgtatgtatgtagctacataggcttccatgggaattgtaaatggctagctgagggcactttcaattgattcagagtaaaacaatctgaggcttgtaacaaatgtacaaaaaactaaaatcaatgagtaactctaataggaagaaactgtttgcattccttatgttacagtttgcttgtaaactgtatgtactttgtttcttttctcaacactgttttaaaactccagcattttcacctaaaagaaaacacaggctcttcataaatacctgtgaacaaataaatga[161 bp omitted]gcctccagagtagctgggactacaggcgcccgcca[131 bp omitted]cactgcgcccagctcaaagataatattttatcttgaagctagtgcatcgatttgtaaagctcatttaattttctacatactcaggatttgcatattgacttaaaatctgactttatcatccatgccgttatcaactagacaaaaaaatgtatcaagcacccacaggatgcacagatctatctctgaactggtgtagtggtattaatctgttctaagactagaattacatttttttttttaagaagctacagtccactgaaaaggaagtattatggtttttctgagaagaaaagttgctaaatactgcagcaaactcaggcttttcctgagaaaagccacaaacaaaatcatctctgaaattttttaagcaacaacttcctgaagcgtggaatttatggggccagtgagacactaaaatttcacaactctcacatacattatctatctaggactcagtgaagatgttcttcagatttttatttaagttaaattggtaaaatacaaaaagaaaatctggattgagtttcaaatcatcttaaatagcaatcctatgaacaattataactgcaatttcaaacactaagacttaaatatacaacttgatcatacaattatctcaaaacatatgatcaaaaactttggtcaagagcttctttcatgaattcttcaaggacagctatcacatttttggcttcaggcatttcttcatgttccactttaacaatcttcaaaagtatatctccactaccacagttctttaggaacatgtaacatttaaacaaagcataatgattcatttctgcctgtcggataaatctcttcaaattgtttgtgtcttgtatggcctagaaaatgattacccagttaaaaatgtgttaagtgaaataataatgaagctcaaaaaataactcctatccagctgagaactcaacatatcttcctgaattgtttgcttttcatattaaatatttccaaaatttaaattgcagtatgctttgcccttggtagaagaagaaaatctccttttttttcttgtttcgctcttgttgcccaggctgaagcgcaatggcttgatctcggttcaccacaaactctgcctcctgggttcaagtgattctcctgcctcagcctcccaagtacctgggactacaggtgtgtgccaccacaccaggctaattttgtattttcagtagagacggggtttcaccatgttggtcaggctggtctcgaacttctgacctcaagtgatccacccgcctcagcctcccaaagtgttggaattacaggcgtgagccaccacgcgcagccaaaaatctcttatacaaaataaaaatactttaaaataatctacctagcatggtggctcatgtctgtaatcccaacactttgggagccccaggcaaaaggattgcctaagggccggtagtttgagactagcctgggcaacacagcaagaccccgtctctacaaaaaataaaaataattagctgagtgtggtggtgcacacctgtagttccagctactcaggaggctgagacaggaagactgcttgaacccaggaggttaaggctgcagtaagccatgattgcaccactgcactctagcctgagtgacagagtaagattctgtctcttaaaacaaacaaacaaaactaaataaggtgacaacacgtccccatcagaattttttttttttagacagagtctcactctgtcacctaggtcggagtgcagtggcacaatctgggctcactgcaacctctgcctcctgggttcaagcaattttcgtgcctcagccacctgacatagccaggattacaggcatgcgccaccaggcccagctaatttttataattttagtagagaaagggttttgccatgttggccaggctggtcttgaactcctggcctcaagcaatccacctgccatggtctcccaaagtgctgggattacaggggtgagccactgcgcccagcccccatcagaattttgaaaacttagccactgaaccagtttttttgtgctttccaactaagttaagtcacaaattgtaagactgatgttccttaaatataagcaagcattcaacccaatttattagaaatgatatgtatacagaagctgccaaaaaataaagtaaatgtcttctgataattccagttttgagaacatcctaattaacagacatcacagctataaagcaatttgttactctgtcactggtactaattaaaattcagacaaaaatttcatgtggcacttggcacacagccaactaattacctttagtttaaagttctccagtacttgtcggaaaagaaaagggttacctcctttggcaccatttaaaaaagcttgcatccaatcctcacaaaaccggttacttcctataaaacatttcagagagactaaataaaatgaaattttacaaagctttatttatttatttatttgagacgggagattcgctcttgttgcccggctggagtgcagccggagtactaactatatcgttagtagagatggggtttcaccatattggccaggctggtctcaaactcctgacctcagatgatccacctgcctcagcctcccaaagtgctgggattacatgtgtgagccactgcgcctgacccatttatttctttataaaaacacctataatgaattatttaagacatgtataatggcctaaaaaaacagtgtgctcaccacatggctaaggaataccaaaatggctgaagccccctgtatgccccttcccaatcacatcccccttcctttcccatcagagaggataatcattcccacagacgtctttaaacttttcccatatacctttgcacgtgtaagccttatctacattattctgcatatgttaaaacttttatgtattttttcttttatggctatttcactaaatagtatgtttgagagctatattgacacaagtagctctagttcattctttttcactgctctgttatattccattgcatgaatatagcagcttatcagttttcttgttgataaacacttaaattgcttccaattccttgctttttcaagtaatgcctttatggacattttaaaattcatctccttgtgtacacatactagaatttctttatgtacctaggtgtggaattgctaggcatggcatgatttccatgtttctagaattatattgttttcaccaagtggtttctcatggtttgagataaccatgtaaaactgcacaaggcaggaagaataaggttgtatcataggctctcagtgcaaagatggggactcgcaagagatgtaggaaggctgcttcagaggttgtagctcacctgcattgcagaactgaggctgggagctgctgcaatcgatgaccacagacttatgctgctcctctgtcatggccatgcacaaagaagtcatggtgccttcatgaataagtccttgaagactggccacactcagaaacctgccacacacacaagtccatttccacaaacaatattgcaggacggaaggatgaaaacaaatttattttgcactgggctggtggggaagggatggaaggagcagtttacaaacacagatgtcaatcttgctgtggaaaagcttttctctttgaaaaaactgttctttacctgttaatgtctctctttgttttttcatctgattctttaacttcaacaggagtgtaactcaaagcctatgagagaaaaataaagcctgattggtacatatattccagtttttcttgagcagctactcatgactaaatgtccccataagtccctaccacactggacaacaattgatgggcactggtcacaagctctccagagccttgttcagccactgctcattaacattttatagaatcaaaattgctctggatttttgttttccttttcaaattgttttggaaactatacctttcccagatcacttggaaaagtaattattttaaaatgttttatcctattaggaagactcagcatttgaaattcaactctaccttagtaatatcactttctagatctgagaaaataaagtgtggtctatcttgatagcaagcatagtttgaatatttggggagggatgggagtcatgttcagagaaaatgagtatgtttctaaatcatccaaagtgattctcagttaaggaaatgctctcatttggcagtacttacagcatgtagcagaaaggtaagcttttcctgaaagagaagaacaaccctttggattgggcatacaacatcctcaaaccagctgctcagataggattttatgtgactctccaggccccttgcctaaatcaagaaagaacatcatttgctttaatataagcctttcctttagtggacttcatattttcttcatcatatccttgatggtgaaaaagaccaggatagacacctccctttttaaagctaacaccaccaattcaaaaaaagaaattgtgatatacctttcctggcttgttgggcagggtgagggttaaatctgtactgaatttatttaaaacacaccaagaaatgcattctataaaatgaagagactgaatagggttccatgctatttcttcacagggaagagttgggcactcacaagtccctctcctcccactgtactgtgcactcaatggagatactcactcaataatcctcatttccctggcacctgtggtacagtgtctaaaacatgcatagtatgagcttattaagtgccttttgaattagtcatgtagatagagaattcattcgtattcagaatgtgaatggggaaggatacaagtaactcatcaaagcactccactccactccagatgtcagacatgctaccgtgagcacatctggctttctaggctatactgctccctgaagactagtgtcacacacgaagagctctagtccgggagaacaactctattagacttgcatcagttgctcactcctgcactatcccttcctctctcctgcagtatcttctaagtatgtgaaaagtataacttctactatatatgtaatgggtagtaaatttgtgagagtcatgactaacaactgctacaagctgaaagcattgtttttgtttgcttttttgagacagggtctcactctgtcatccaggctggagtgcagtggtgcaatcatagctcactgcagcctcaacttcccaggctcaagcgatcctcccacctcagcctcccaagtagctgggactacaggtgcgtgccaccatgcctggctaatttttgtatttgttgtagagatggggtttcactttgttgcccaggctggccttgaactcctgggctcaagtgatctgcccgctttggcctctcaaagtgctgagattacaggtgtgagccaccacacccagccagtttttcaaaggtttgaataagttgatatggatatgcctaattcataaaagatcaattaatgaaaatagaatgtttttaagaatctttgatgtttagttcaagaacagccatactattgcatagcatgtctttggtgccagaggctgcatggaccagtacttctgaccataatataaatcttatatgcctagaaatcaggaaaaggacatcctcttcctcgccaggcatgttactacatgccattgaatagatcgaatttttcatagatacaaaacatcagacgtagtcttgtgaaactttcagcacttacaggactatg[132 bp omitted]aatatggcaaaaccccacctctaccaaaaatacaattagctgggcatggtggtgcatgcctgtggtaccagctacttgggaggctgaggtgggaggatcgctggagcccagaaaaggctgcagtaagccatgatcgtgccactgcactccagcctgggtgatagagtgagaccctatctcaaaaaatgaaaaagaaaaagaaaccacctgtaggctgggcacaatggctcgtgtctgtaatctcagcactttgggtggctgaggagggaggattgcttgaggccaggaatcctagaccagcctgggcaacaaagtgagatccccatctcgacaaaaaataccaaaagttagccaggcgtgttggtatttgcctgtagtcccagctgtttaggaggctgaggcgagaagactgcttgagccccaagaagctgaggctgcagtgagcctgatcgcgccactgccctgcagcctgggcaacaaagcaagaccctgtctaaaaaaaaaaaaaattcacctctctactagctcacaaggtggcaagtttctagaatacaggcgtctttgtgtctacctatatgatttgacaagtagagcaatcacagtatattaatcatttcagtcattattttatttttttaactctgtcgctcaggctggagtgcagtggtgcaatctcggctcactgaaacctctgcctcccgggttcaagcgattctcctgcctcagcctcccaagtagctgggactacaggtgcctgccaccatgcctggctaagttttagtagagat[141 bp omitted]cctcacaattcatgttatttttcagcccttgaatgtacttgtccaattcaagcctgaaagtatgttcttaaggaagcaataaaggatgaataatgaagacagtatttcatctctcaacaagaaatataaaatctctcaaataatgtgagctgcaaatgcaaacaagccaaggcaaaatggccacatgaaggtatgaaattcaactaaatacacgaggagtagaaaagctttttggaggttggtagtaatattcttccacctgccttcccatgttttccttcctgatgttctcaaaaaccaaagaaaggatatagctcaagtcctttttcagaccctcctaaaaaacagaccacatattctgaagggttacgttcagagtctatcgttactgtttcaggaagcagtttttcattttggaaaaggcagtaataacaaccaactcggtaacctggaattctagaaaagaaagaaaatgtaaaatgcattattttggttactcatgcatctataattttgtggactgctctgaattctggtcatcttgatctggcaacaccattaaactgcccactaactcagagcttcccagacttctcgttggtgtacttgcagcagcaaagaaaaatgaatgtataccctggagggctttagttaaagcagccactaacatacatgaaatttctttgaattctcctgtcttatgtgaaaaattcacacaaatttcactctagttcatacccatgtttatattaaaaaaaagtatgttctcccctctcccaaagcttcacaaattgatgtttaaggcagatgtgcctgaaggtggccttatccttgggaagtggcctcaaactcctgaggacctgtatgctaacttcacggtctgagttgaactagaataaagaggtgtaatggaggccgggcacagtggctcacacctgtaatcccagcactttgggaggccaaggcgggtgaatcacctgaggtcaggagttcgagaccagcctggccaacatggtgaaaccccatctctactaaaaatacaaaaattagccgggtatggtggtgcatgcctgtaatcccagctattcgggaggctgaggcaggagaattgcttgaaccagggaggcggaggttgcagtaagccaagatcatgctactgtactccagtctgggcaacagagtgagactctgtcttaaaaaaaacaaaacaaaacaaaaaaggagaggtgtaatggaaagacagttggaattggactaagaatgctcatgtttaagcctgaactccatcaatttgaccagcctcatgacttaagtttacataaactctgagtttatttcctcatctgaaaatgaaaataagagagtatctgctatatttcccctttgtaaggaaaactacataaaagtttgtgaaaatacaaactgtatacaaatttagttttaataatcaacacttttcttcttctaagtacaaaacttattagcctgggcaacatggtaggaccccatttctaaaaaaaaaaaaaaaaaaaaattaaaaaaattgctgggcatcgtagtgcctgcctgcagtcccagctacttgggaggctgaggtgagaggattgattaagcccaggaggtcaaggctgcagtgagctgtaatcgggccgctgcactccagcctgggcaacaaagcaagaccctgtctcaaaaaaaaataaactaattaaataaagtgcaattgggtgccagggtctctgccattcaattaattccattccacaaatgtttatgtgtgaggcccagtgctcgggctgccagagaataaagacaaattctgcaggtctagtaggagctgatcttttggagtttctcatcacttctcatatttagttcagaaataaaaactcaggacacagcacattttgcacttactttagctccacagatgcaacattacccagcccttcaaagactgcacctcttgaaagacgcttagcaatgaaactgcgcagctctggctccacttcggatggtagattagtatctgccaaggagaggcttgacaaatgaaagacacacattctttaccagtggactagggtattcacacccattaagtcagacagaatggtaccaacgccaggggctcttttaaggactggggaaagctgtccttatgacccctattggtgaggcttctaggaatgtatgtcactaagtatgatctacctcatcaaatagcttaaaatattcctatctttccagctcattctctccagtactgtgactccactggaacccccaatccactgaccctacctctttttcagtctctcaagtttctcatctcacttccctccttattctgccttaattccatggtcagtcattataatcacacccctgcacacattcttatcttttttatctttcaactttattgaggtataattgatgatttaaaaatttcagggctggggccgggagcagtggctcacgcctgtaatctcagcactttgggaggccgaggcaggtggaccacaaggtcaagagatagagatcatcctggctaacacagtgaaaccccgtctctactaaaaaaaaatacaaaaaaattagccgggcgtg[134 bp omitted]tcaaaaaaaaaaaaaaatttttcagggctgggcaaggtggctcatgcctgtaatcccaacactttgcgaggcagaagtgggcggatcacttgagtccaggagttcaagaccagcctgggcaacatggtgaaaccccatctctaccagaaatacaaaaattagccaggcgtggtggtcagtagtcccagctactggggaggctgaggtgagaggatcacctgaggccggggaggttgacgctgcagcgagccaaagtcatgccactgcactccagcctgggcagcagagcaagaccctgtctcaatttaaaaggaaaaagaaaaaaaaaggatttctttttggctaatcaccaagcacactatcagtatgtggatttgtttgccccagccttgaatgaaccagccaatgaggaaatcaggatgaggttcctaggggataggaggaattgacggtttgactcagggaaagctcagtggaaatagagtatccactgacatgtacaggccagagatgcagggaagatgaaagcacatgcatgaattatgctgaagctctttttacctgaaatcatcaccagagggagtttctgcatttgtgccacttgggcttccgtcctcactgtcccctcgttgctgtgccaatctacaagccacaaaaccaatagtgctatcaattatgggctctaaaccaagaggagtatgggggcctggcaagcagggtaaggcaaggagtcaactaaaaatgctgcaaggtggaagtgcactgcctatcctcatgacaaggaaaacccatacagcagtgctgacaagagccccttctctctccaggccacttaacgggtggaggaaaggctaaatacccagaaggttcaaggaaactcctttaaaaaccaaacttgacaaggccaagaaggttccaggaaagtcagaaggaggaaaaagaggaatcaagaacagaggaaaaccagagggtggggatgggggtgtgtgtgacagaaatgggagaagtggggagataatgacagaaaggagaggggacgggaactgaaattattgagcatgcggggcactgcgctaaacaaagggcagccgcgagagtaagaggctgggatgatataggggcagatgaagggcacaggcatggttgggccaggcatacaagtccacgacgggggccaggaagagcagcgggaggcgaggagcgcccttcaggccagagaccttggctgggagaggagaagatggcttttaggagcggccgggccgctgggccgggggtggggtgcaaggccgggcggcgggccgggggcggggccgcaggggcgggcgggctggcaggccgagctgggcgccagcacctgcttccgcgatagctgtaaagacagtagtggctgctggacggcggctcgagtctccgctcctcggctgagcctccctcttcgctgctctctagttccttttcatctccatccatcgactcctgcaaagaggggagcattgcggcggcctctgagcggccctgtgtctccgccaaaccgctcccctgctcccgtgcagccgtcggtatcagggctcgtccggctcccggccctcgcacacctgcgttccgctggtttccccgggttcgcaggcaaggactggcctggaaagggagtctcttctccccacaggggctgacaggcgtactgagttcgcctttactgacaagcttttaccatttattttgaacttattttcctttgagacatctgggaaactttctatgtgataaaggtggcacaactacctagccacatggaaaagaataaggctactcgtctgcctccttgcgcgcgtgccagcacgcacagacacccgtttgatcaaaaagttaagaatttaaaatgaattttgttaaagtgaaaatatgggataattttgttaattcttgaagagggtctttccaaacataacaaaacacttagaagtcatacaggaaaacgtttaaaaaaatgactacgtaaaaactaaaaggccgggcacggtggctcacgcctgtaattccagtgctttgggagaccgacgcaggcggatcacttgaggtcagaagttcaagaccagcctgggcaacatggtgaaactgtgtctctactaaaagtacaaaaaaattagccacgtgtggtggttcacgcctgtaatgccagctacccttccagtctctgcccattacccagttctaacaccaattcacattttcaggtgtttgtttctgcaacaccccattctctggtaccagttttctgtctcagtccattttatgatgctataaaaggataccaaagactgggcaatttataattagctcttaaaggccccacttcttaatagtcttacaatggcaattacatttcaacatgaatttgggagtggacaaacactcaaaccatagcgccacgtgaaggaggaggcagactggagtgatgtatctacaaaccaaggaatgtcaaggattgatggtcatcaccagaagctaggagaggacatggaacagattctcccctagaggcttcaagagagtatgtccccaccagcacctccatgtcaacttccagcctccagaactgtgaaataatacatttccattgttttaagccaccgtgtgtgtgtgcatgcgtgtgttttgtgttttttttttttatttttagtagtgcaaactttattcataaataaaacttcataaagttaaaagcaggggcagttcctatttttaaaaaggaatagtggaaggcaacctgccatttcatttaaaattacaagttaggtttttcagatggataacagttgagatcgttaaatccccttcctgcttctcagattttcacaaaatagcacattaaatcctcagtcctaagcaattatggcagagattccaaattgcctctccatatcaaagtggatagcacagtttcttctcttgcaataaaggtactcatttgatgaacaagtgagtatagcagtcagattcttaaaagattgtattgcagaagttactgccatgtcttcattcgcaatgggtatcctcacctctatctcccattcagtaacattgtcagtttccttatctctcatttcaactacatttaaaagaggattctgattgcggacaacacatgacagaggcatttcagatcggcagtagtctcttgagatatacttgattttagttttaagcagaagaacttcctggagaggttgagttaccacagtcatgaggatggtagaaaaactcatagtagatatttggcaaaactaggttacaaggcagccatctcctagaaacacttcatcggggttcatatacaaattgtgaaatatcgtgggtttaatcctggcacagaaccaaaactgggtgcattgtacttgaatagccgaccagtccccagcacaggtccatatcaaggaattgagaaaaaagagcccatttaaccgcaaaatggtcttcatttgcccagactgaaagccaaatctcactcaggaaacagctgtatttttattttttatagagacagtgtatcactttgttgctcaggctggtcttgaactcctgggctcaagtgatccttctgccccatcctcccgaagtgctgacattacaggtgtgagccaccatgccca[143 bp omitted]aaccccatctctactaaaaatacaaaaaattagcccagtgaggtggtgggcacctgtagtcccagctagttgggaggctgaggcaggagaatggcatgaacctgggaggcagagtgcactccagcctgggccatagagccagactctgtctcaaaaaaa[131 bp omitted]aaatcccatctctactgaaaatacaaaagttagcctggcatggtggcacacacctgtagtcacagctactcaggaggctgaggcagaagactcacttgaacccgggaggcagaggttgcagtgagccgaaatcatgccactgcactccagcctgggtgacagagtgagactctgtctcaaaaaaaaataaataaaaataaaaaaagaaagaaaggaagtaatagagtcccccccaacaaccctttcttctattcttatctggatttcttcacattcttccctgttaatcccattttttctagattatggtttattctcttgatttgctcaagtactgcctccaatattagccaagaaagggtatatataaaataatttttaagctcttgcatgtctgaaaatatatcctcacgtctttattgtattttcacatttgattggatattccttagaaatagaattttaggggccaggcatggtggcacacacctgtaatcccagcactttgggaggctgaggcaggcggatcacaaggtcaggagttcgagaccagcctggccaacatggtgaaaccccgtctctattaaaaacacaaaaattagccaggcctggtggtgcacgcctgtgatcccagctactcagaaggctgaggcagaagaatcacttgaacctgggaggcagaggttgcagtgagccaagatcatgccactgctctccagcctgggcaacagagtaagactccatctcaggggggaaaaaagaaatagaattttagattgatatgattggacatcgaattctaggttgaaaagaattcccctggccgggcgcggtggctcacacctgtaatcccagcactttggaaggctgaggcaggcagatcacaaggtcaggagattgagaccaccctggccaacatggtgaaaccctgtctctactaaaaatataagaattaggcgggcgtggtggcgcatgcctgtagtcccagctactcgggagtctgaggcagcagaatccccatgttcgtcaggctggtcttgaactcctgacctcgtgatctgccctcttcggcttcccaaagtgctgggattacaggcatgagccaccgtgcctggtccgaatcaaccatttctccaaggacctcaggttgcttttactggagaatggtattacaaaccaagatctctggacaaagtatgcttgatatgggacattattgcttctaggccctctcagctgatatatgtatctatactaactttagtatatacacatatccataaatatttctctatgtatctattttaaaataaacacgagttcattctggtgtctccagctctaatccatggccgcatggatcattctagcctcctccccttgcttatctataaactcactacaacgagaggcacagcatggtggctcacgcttgttaatcttaacacttagaagctaaggcaggaggatcacttgagcccaggagttcaagaccagcctggacaacaaagcgagaccttacctctacaaaaaacacaaaaattagcaaggcatggtggcatggccctgtagtccctgctactccgtgggctgaggtgggaggatccattgagcccaggagatcaaggctgcagtgtgctacgattgcaccactgcacactaccagcctgggccaccgaaacccagctaatttttaattttttcatagagacaggatattgctttgttgcccaggctcgccttaaacttctggcttcaagtgattctcccacctcagcctcccaaggtactgggattacaggaatgggctagcgcaccaggccttctttaatttctaacagcaatttttttttgtttttttttgagacgcagtctcgctctgttgccaggctggagtgcagtggcacgatctcggctcactgcaacctctgcctcccaggttcaagcgattctcctgcctcagcctcccgagtagctggaactacaggcacacgccactaggcccagctaatttttgtatttttagcagagacagggtttcaccatgttggccaggatggtctcaatctcttgacctcaggtgatccgcctgcctaagcctcccaactaacagcaatattttattgcttattgctttcatagtaaaagtgttttaatctgtttatggtgctgtaacaaacaccacagactggggaatttatgaataacagaattgtatttctttctttctttttttttttggagctggagtctcactctgacaccaaggctggagtacagtggcacaatctcagctcactgcaacctccacctgccaggttcaagcctcagcctgggttctactgtctcagcctcctgagtagctgggatgacaggcacccaccacaatgcccagctaatttttgtattttcagtagagacaggattttgccatgttggcaaggctggtctcgaactcttgatctcaggtgatcaacccacatcggcctcccaaagtgctgggattacaggcatgagccaccacacctggccagaattttatttcttttctttcttttttttcccccgagatggagtttcactcttattgcacaggctggagtgcaatggcgcaatctcggctcactacaacctccgcctcctgggttcaagtgattctcctgcctcagcctccagagtagctgggattacaggcgcccgccaccacactcagctattttttttgtattttttagtagagacagggtttcatcatgttggccaggctggtctcgaactcctgacctcaggtgatccacctacctcagcctcccaaagtgttgggattacaggggtgagccaccaccacacccactgaattatattttcttatagtctggaaatttggaaatccaagatcaaggcactaatactcagtgtctgatgagggcattcttgctgcatcctcatttggttgaggcaagagagagtagagtttagttccttccagcactttaataaaatcactaatccccccccacccagtttactcatgatttaatcacctgctaaaggtcccaactcttaatgctatcacattggtgattacgtttcaagcagttggggggatattcagcacattgcaatacggttttaaactttttcatttttcaatttattttttcatagagatggtctcactatggtgcccaggttggtctcacactcctggcctcaagccaccctcttgcctcagtctcccaaagcacggcaattacaggcttgagcaactgcacccagcctgaactttttttttttttttctttttgagacagagtcttgctctgtcgcccggactggagtgcagcagagtgatctcggctcactgcagcctccgcctcccgggttcaagcgattctcctgcctcagcctccggagtagctgggattacaggcgtgccccaccacgcctggctaatttttttttggtatttttagtaaagaccgggtttcaccatgttggccaggctggtcttcaactcctgatctcaggtgatccacccgcctcagcctcccacagtgctgggattacaggtgtgagccactgcgcacagcccaaactgatcctttaaaattcaaatttaattcagctccacacatactttgtgttttggggcaaattattccagctctcttaagtctcttttatctcatctctattaacaagttgacaataatggctcctaccccagaggctgagacaaataatgttaaaactcactacaatgcttggcacacggtaggtgctccatggatgtctgctattattttttgcttttaatagtaacataatttacattactagttattattatatgctaagctctgttttaagtgcagccaagatgaagtttaactgccttgcccaaagtcaggcagctaagcagtggcactggtggactatgaacccaagcactggacttttaaccacctctcacttgcatgatcctccagttgccctcttagaaccactgtgccttctcagagacttcagctgaaatccaacttctgagaatgcttctagggttcgccagaacccgcctttgctagcctccctaggattatctcttgtgaccagcaccttcactgacagctccagtcttttttttttttttttgagacggagtctcactctgtcacccaggctggaatgcaatggcgagatctcggctcactgcaaccttcacctcccaggtccaagtgattctcctgcctcattctcccgagtagctgaggttacaggcgcctgccactacgcctggctaatttttgtatttttagtagagacagggtttcaccatgtcggccaggctggtctcgaactcctgacctcaagtgatccgcctgcctcggccttggcccatagtgttgggattactggcgtgagcaaccgcgcccggctatcagctccagtcttaccacgattagtttttcacgtgcccagcctcaaagacttaaactctttgctcccttacggagataccctttccttcaccttgcttgctcccgttgactcctcaagaaacctttcttatgtcgggcgcagcggctcaagcctgcaatccagcactttgggaggccgaggcgggcggatcacttgagcccaggagttcgagaccagcctcgctaacatggtgaaaccccattctactaaaaatacaaaaattagccgggcttggtggcgcgggcctgcagtcccagctactcgggaggctgaggtaggagaatcgcttgaacccgggagacggaggttgcagtgagcagagatcgcgccgctgcactccagcctgggagacagagcgagacttggtctcagaaaaataaaacaaaacaaagaaaaacaaaactttacttgacaacccaacgaccactaccactacagccgccctaggactcccgctctctgaggtcctacagcacttcgcatttccctcaacgccgcactgagaactctgcattgtgtactcgtctgtcaccaatctgcgagttacaaagcagagactaacttatttggtttagcatttaataggcacataatcaacatttactgttcaattgaaacaaaattaaaattgggcgctgtctctatctttatttgtgatcggccctaactgcactggcaatcttttccgtttttttgttttctgttttccattcgcatgccccttagcgtacctggggctccggctcctttacaaatgaaacccaaagtgctccgcaagcacagccagcgaaagcgaaaaactctgaaacggacaagatggctgccacctcttcgcgcctcttagtcccacccactcagggcggaggtctgcgtcatgtgaccctccccttcttggctccgcctcctaccgcagtgcttgacgggaggcggagcggggaacgaggccgtcggccattttgtgtctgcttcctgtgggacgtggtggtagccgttgggttgggaaagtgagggatttttggcctcgtttctcctgcttcttttctcctcccttttactttgccggtagaacacagttatgggtcgcaagaagaagaagcagctgaagccgtggtgctggtatcctttgtcggtttgaagtcgaggtcgcgttggggtgccggttgttggggcctgggactaggaggcctggatttggcttacggcgtggagcgtttgtatttaggcgtctgcgtgggtggcctggtggctgggattggacttgggaaggcttctaggaaaatggggttccgaggtcgacaggcttttgcagttgtgggtcgtgtgactctgtgactcaggaggatcttgttcggtgcgaattttggactccgggaggcggcctggacccctccgccagggacagtgtcccctagggactattcagccaccttccgttgttttggtgacgattcaacaagggacttttcttcgagtgcgataggcttattactttcatggagggttggggacagcttcacagtctgtcacccactttttctgtttttatttactttatgtgtgttttgtgtttattttttcgaattggcggtttagtaaagaaccaagttagtcaaccctggtttcgaacctttttttttttttttttcttttcggggcgggaggagaactagcttccgtgtctcacccagaggcgccttaatcttcaggaagcgttctcacagggcggagtttctgttacccaactttgtaggactaaaaagtgcctatcttattaggaaaactcttactacagtgtggtattaatgctttttctggaagcgttaatattctttacattaaaattgattttatttactgttttgtacgtaaaggcggcttgttacagtactgcgtttatgtaacagttttaaaaatagcttaaatacggttacgaattttgtaatgtgattttaggaaaatctgagtagtgaggtaagaattctgttttattgatgtaagaattctgctttattgattttattgatctgtgaatttaaatacattgcttggcaacataaattcatacggaattggaaacaactttatggattgttcattcgaaattatgtgattattgttcaccatatagttactcttagattctaaatattgctaaattcctaatccagttattgctatcgtcttcatatctagtgaagtaattgtcttgacagaaccttagggatttcttaactgaactctttcctgtcctcagtgtgcatttgtaaatgttgaaatatttataacaaaagtttcaccgacatctctgttaaacacaggaatttgacaaagtatattgctgattattgagatgtgttttttggggtggtgaagagagctggccttctaggaaattgaaaatactgaaataacatggcaagtgtagtccctaattgtgtaataaatataaaaagcagagtttctatacagtaccattttggttttagctgttcccatattgtaatgttatccatatgtttttattataggcagtgtcatcattaggctgtctttgtgccttaacagtattgatcaggtattgtaatagagattttgatgatgagaagatccttattcagcaccaaaaagcaaagcattttaaatgccatatatgtcacaagaaattgtatacaggacctggcttagctattcattgcatgcaggtaaggatttttcttctgtatttattgtccgcttgtgatttggaaacaacttgaaagaataatcttttttatttttttgagtttcggtcttgtcgcccaagctggagtgcagtggtgcaatctcggcccactgcaacctctgcctctcgggttcaagctattcttctgcctcagcctccggagtagttgggactacaggcagccgccaccatgcccggctaattttttgtatttttagtagagactggggtttcaccatgttggccaggctggtctcgaactcctgacctcaggtgatccacccacctgggcctcccagagtgctgggattacaggcgtgagccaccgcgcctggccgaaagaataatcatttatttctctgacaactgtagttttgttttttttttgttcacttacttactgcaaaagataagatagccaatcagcattaaaaaaaacaaaaaatttgttcgatagccatcaagacaataaacaaaactggctttttatgtttaaagagggtttgtatttgtatttagtttgatagtaccttactaggttagattggtaacatatcgaaatcactaaatatttcctgagtacttggagcagagaacaaggatcagcgatttagattttgtaggtggtctggccttaagaattaatacttaattagcagtcattactcactgccattgaaggatctgttattatctgtagcttggggctaggctaatttcagcaatttatttattggacttcttttggaatggcagcattgtactttttgcttttgtttttaagagatggccttgctctgtggcccaggctggattgcagtgacatggttatggctcactgcagcctcatattcctgggttctagccgtcttcctgcctcgttctcccaaagccctgggattatgggcatgagccattgtgccagcccagaattgtatttcatttaataatttctaggtttcggctgggcgcggtggctcacgcctgtaatcccagcgctttgggaggccaaggtgggcggatcacaaggtcaggagttcaagacagcctgaccaacatggtgaaaccccatctctactaaagatacaaaaattagccgggtgtggtggcatgggcctgtaatcctggctactggggaggctgaggcaagagaatcatttgaaccctggaggcagaggttgcagtgagctgagatggtgccactgcattccagcctgggcaacagggtgagactctgtctcaataataataataatgacaataatttctaggtttttaaagttcttttaataaatagcgagagcattgtaatttatattttttaagatctagtaagtaccttcatgtctcattcaacattattctactttgcttagtcctagagctgtctgaatttttgctaaattagaccttacagaaatatgagatgagcaaataccaaatcattggaaactactatgggtgggaggtagggagacgtgatttctccaggtttaaagataaatttatatagatccttttcactcc[143 bp omitted]gaaaccccatctctacaaataccaaaaattagctgggcatggtggcaggcacatgtagtcctggctacgggggcggggggagggctgggggcggggggcgcgaggcgggtgctgagacaggagaatcacttgaacccgggaggcagagtttgcggtgagctgagtttgtgccactgcactccagcctgggtgacagagactctgtctccaaaaaaaaaaaaaaaaaaaaaaaaattgttagagaacctactacatgttagactcacagctgttcactgttgcagccattagttacatgtggctatttaaaatgatataaatatctaaatgctcagtttctctgtcaagtagctaacttatattgggtagtgtggataagaacattttgttttgattgattgacagggtctcattctgttgtccaggctggagtgcagatcatagctcaccgcaactttgaactcccttactcaaatgatccttccaccttagcctcctgagtacctgggacaacaattgtgtaccaccatacctggctatttttaaaattttatttttgtagagacagggtctcactatgttgcacaggctggtcgcccaactcccaggatcaatcgattctcccactcggcctcccaaagtgctggaattacagttgtgagccactgagcccggccattttctttaattctgaatgaaataggggtttaaatagagatgtatgctctgtcagttttttttttgttttattttgaaacggagttttgctctgtcttgtgctcactgcagcctccgcctcctgggcttaagtgattcttgtgcatcagccttccaaatagctaggattacaggcatgcaccaccgtgcctgcctgagttgtatttttagtagagatggggcttcaccacgttggccagggtggtcttgaactcctggcctcaagtgatcccatctactttggcctcccaaagtgctgggattacaggcataagtcactgcagctggcctctattagacttttttttttttcttgagacggagtctctttcgtccaggctggagtgcagtgggcgtgatctcggctcaccgcagcctctgccctccgggttcaagcaattctcctgcctcagcctctcgagtagctgggattacagacgcctgccattgtgcctagctaattgttttgtatttttagtacagatggggtttcacc[137 bp omitted]gaaagtaaagtgcagagtacggtgagaccactttagaagacttagaatattccagacaagaggagatggtgacagagaccagagtttgataggttagatatggggtataagaaaaagtgaggagttaagggtggtctcaagatgttgatctcaagatggtctggctaggtgcggtggctcacgcctgtaatcagcactttggtaggccgagatggactaatcacttgatcctaatagttcgagactagcctgggcaatataatgagaccctgtctctacaaaaaatgcaaagttgggcatggtggcacgtgcctgtgtcccagctactcaggaggctgaggcaggaggatcgcttgagctggggaggacgagactgcagtgagccgtgatagcactactcagctccaacttgggctacaagagtgaaaccctgtctcaaaaatgtttattttgagcatatgacgagatgtgaaaagctacagggataataggcttaagaatgagaataagggagtcctgtgttaattttgagtgtaggtatgtttgaggtctattaaatatccagatgaaaaggttaccgaagcagtttgatgtacaagtcaggagttcatagaaattaaaacaggagatagaaatttggacgcatacaatgtaagggtggctagtttaagccgcgctaccagatgtcctttgtaaggactgtagtgtggttggaaattaggtgctctctgctctaggccacttccaacatttgaaggtcaggagattaaaaggaatcgtctaaggagatgaaaggtaggaaaaccaagagtagtgccctggaagtcaatgacgtgtttcaaggagtgagttatttaactgagtcaaatgctggttcagtaagagtactgagactgggttaataaggtcattggtgacttgacaaagagcgatttccaagagtggtgagggtgaagtgtgattacggtgctttgaagagacagggagaggaagcgaaggcattcttagggagttgcactttatgaagagcagagaagtggagtggaagcttcaaggttagttgagaaacttagtaacattattgtctgagtgcctttatttagtcctattttcacagcaacctgtgagatagacctggcagttaaatcataccaattttatagatgataaaccctaagacattattagtaagttaggtggttccctgcagtttctcatcagtgcttgctcctgtcttttcaaccaagacgctatgactttgcttggcagggtcccaagaaatctaattctggctgtaccataatagatacacctttaattgttgcccttctcaaaaatgtagtgaagattagtgtgtatgtgaatgtaattgtttatagaatgcctgttgcatcatctctttattaagaatagcaaaatattccaaaaaaccttaggaaacggcaattaagtcacttgttaagccgctttatccataaatattttaattgcaatataaggaatagcttttaacaatcagatattaagataatttctgagtttgatttgcatgccccagtttcaaatctttaagtgagatacattgctaagaagaaaatacttagctttttgtagttacttttctgttcgtacatgaaaatgtcttaggaggaaagaaaaaatgagtattatttgggcaaatatatctaagtcattagcctaaatgagtgcttctcaaacttgagcatgcattagcatttccagaaaggcttgatagtctaggcaaaatactttgacatctacttcagcaaaatggcttgctgaagaaaccaagactggcagggatattacattattggcaaaagttacccagatctgaagattagaagcgcttatgtagcaaaacaatataatgaaaaaaaatcccagattttcagtgtgttgcaataaacatgttaaagtgcctcagggctgggcatggtggctcacctctgtaacccagcactttaggacactgaggtgggtggatcccttgagttcaggagtttgagagcagcctggggaacataacaaaactacctcgccacagaaaatacaaaaattagccaggcatggcggcacgcacctgtagtcccagttacttgggaggctgaggtgggagggtggcttgagcttgggaggcggaggttgcagtgaactgagataatggcactgtactcctgcttgggtggcagagtgagaccctgtcttaaaaaaaaaaaaaagtaaaatgcctcacgtaactcattagttacaagtgatactgattgcaaatgtaacttttctagtttgtaaccagaggcttgtctcaagatctatacttagaaaatttgctattctaattattattattattattattattattattattattattatttttttttttttttgagacagaatctcgctctcttgcccaggctagagtgccgtggcacggtctcggctcactgtaacctctgcctcccgtgttcaagcgattcttctgcctcagcctcctgagtagctgggattacaggcacgtgccaccatgcccggctaatttttgtatttttagtagagatggg[143 bp omitted]cagtatctgcccaggctggagtgctcactgcaacctctgcctcccaggttcaagtgattctcatgcctcagcctgtcgagtgactgggattatgggtgtgcaccaccacgccctgctaattttttttttgttttttttgagggactctccctctcacgcaggctggattgcagtggtgtgacctctgctcacttcaagtgattctgcctcctcagcctccccagtagctgggattacaggcagaccccaccacacccgactaattttttgtatttttagtcgggacagggttttgccacgttggccaggctggtctcaaactcctgacctcaggtgatccacccgtcttggcctcccaagtgctgggattacagatgtgagccacctcgcctggctatattctaattcttaatatgaggctgtttcataatctttacttaattcacacttgaaacatccctgatttggataggactactagttactgctaataattgaagtaatcaagattatatggtaaacttgaaagaatgtttattgaatgcttactgtatgttagacatctcgccaagtgttttttatatacagtatttaatcctaaaaacaactctagaagttagctattatataggtgaagtaaactgaggcttagaagttcactgacatgcttaatgtcacagagctagtgaatggcaaaactgggaattggctctacatggcctcactatagaacatttattctttatactaagcagtctttgattaacttggaattattcttaaaaaagacttttatctaatggaaattgttgttgttaggtacataaagaaacaatagatgccgtaccaaatgcaatacctggaagaacagacatagagttggaaatatatggtatggaaggtattccagaaaaagacatggatgaaagacgacgacttcttgaacagaaaacacaaggtaaatattgggataagttttattttatttatttattttttttaatttttttttttttgagacagaggcttactctgtccagccgaggctggagtacagtggtgtgatctgggctctctgcatcttctgcctccggggtttaagtgattgtttgtttgtttttttcttttttgaggtggagtcttgctctgttgccaggctggagtgcagtagcatgatctcggctcattgcactgcaacctctgcttcccaggttcaagccattctcttgacttggcctcctgagtagctggcactacaggcatgcactaccacgcccggctagtttttgtgtttttagtagatacggggttttaccatgttggtcaggctggtctcgaactccagaccctaagtggtgatttgcccacttttgcctcgcaaagtgctgggattacaggcgcaagccaccacacccagctgatttttgtttgtttttgtttttgttttgagatggagtctcactctgttgcccaggctggagtgcagaggtgcgatctcggcttaccacaacctccgcttcccaggttcaagcaattctcctgcctcagccttcggagtagctgggattagaggtgtgtgccaccacacctggctaatttttgtgtttttagtagagacagg[134 bp omitted]ggtttcaccatgttggtcaggctggtctcaaactcctgacctcaagcaatctacctgctgaggcctccctaagtgctgggattacaggtgtgagccaccatctctctccccttgtgataatattcttttttcagcctcacttaagcccagagttagtattttcaattataaatttaatggtagggtagttggagtggctcacacctgtaatcccagcactatgggcaggcagtgcaggaaaattgcttgagcccagaaattgggagaccaacctaggcaatagagaatgacaccctgtctttacaaaaaaaaaatacaaaaattagccgggtgtggtggcacatgcctatagtctaagctgaggtgggaggatctcttgagcccaaggggttgaggcttcagtgagctgtgaattctccagtctgggcaacagagtgagatcctatttagataaatcgattgattgatcacttgatagatagataaaattgaatggtagatgatagatttatttggaatttaaaatttgagctctgtttttgaagacatacttgatttgtatatatgcagtaccatttggatcattccattttcttatattattattcataattgaattccaaatagaattagcaagtgttaaggcatatgaaaatgaaggactcctataatttcagtgctttaggtagctgaggccgtaggatcacttgaggccaaaagttcaagacctcacctttaccccccccccaaaaaaaaaaaaaaaaagcccagtgtggtggcatgtgtctgcagtcccagctacttgggagactgtggcgggaggatcgcttcagcccaggagtttgagagtgcagtgagctgcagtcgtgccactgctgtacagcctgcatcgcagagcaagactttactaaaaatttaaaagaaaaaatactgatttaggataatcattttacctttcataggacagggaaagaacgttaatcttgtttaatatagggcgaaaacacatttgaagaacatagagcagtattaattgaatttttggggaagaaaaatctcatgaagtaattttacccatatatgtatttttaaatattgaatgttgtaaataaactttcttagtttttactctatggaaataattttttttttttaacagaaagtcaaaaaaagaagcaacaagatgattctgatgaatatgatgatgacgactctgcagcctcaacttcatttcagccacagcctgttcaacctcagcaaggttatattcctccaatggcacagccaggactgccaccagtaccaggagcaccaggaatgcctccaggtagcacataggattgcttaaaatctaacatttttaggacattattgatattgtatcgaagtattactttcttccctctaactctttaatatttgttattattttgattgaaattcttgcttgtaggcatacctccattaatgccaggtgttcctcctctgatgccaggaatgccaccagttatgccaggcatgccacctgggtaagaaaattcttttaattgccctgtaggcttgtgcctagtaatgatctttttcaatttggatgttatatgaatgaaatgttactttccattttttgcttctagaaggtatgggctctatatatcttgtctaataaagggatcaaccagtaaatttaaggaatataaatttgcctctgagtaatagatttttgggttttagggtatatgtaagcaaccatctacttcaattgcatttactgtgattaaagtagttggttatttatagatttgcgtttctgagattcagaattatctgtgacactttgtagttgtgacaagaagcagagaaactctgtaaatgatttatttgtcaaagcatcaaaactaaaatgaatatgaggtgcttgtgcccatcacttttacttaaatattgttggatgtgagaggtatacaatacactttcccactgtattttgaaaatcacagttagattttgattttgtcatacattttcacagattgcatcatcagagaaaatacacccagtcattttgcggtgaaaacatgtaagcatctcattcataatgtaattcaggaggtataatcatactgtcatttttttatgtgtgtgtttaatggtatctattcagttgacttcagaaattttctaaccttcctcactaaaacttgcaagctaattaacacaggtctcttaaagaaggaaaataaaacatcttttaggaaacggtaatagacccatataaacatacttcaaatgtgcagtgattttctccaaactattgaaagtaatgggacctgttaataagggttagtatttaagaaagactatattctatgaaattacatgctttattattataggatgtaatggaattttctaatctattaatagaagttaatcttctgataaaaattttaaatcaagaactgaatttacccacaaaaatttaaaaaatttgaaagaaaattgaccaatttatcattttttaagtgaattggacactgatatttgaaggtgagctcttttaggggaaaaaataagtgggttgtgtttttaagtcatggtttagtggtaggtagttattgtaaataggccatctggttttacttttgagtgtctttaattttggtggtagtatttcctttctctaaaaaaaaaaagtgtgtgtgtgtgtgtgtgtgtgtgtatatgtatgtatttgacacagggtctcttactctgtcgcccagactacagtgcagtggcgcagtcacagcttactgcagccttgacctcctgggctcaagtgatcctcccacctcagccctctgagtatctgggactacaggcgcacactactgcacccagctaatgtttaaaatttttgcttttttaaaaagttatggtctcactttttgcccagcctggtttgaactcctgagttcaagcagtccttgagccttggcctctcaaaacttctgggattataggcatgagctgctgcacctagccaaataaaaaatctcatttcacagggtacattcattcaatctttttcttttcaaaatccaacacaactctgaaatagagatttcttctttttctttaatactctgtggatattttccaagtggaaaaagtggtgaatttgctttcccattacacatattttagatgaggcctcttgtacatattgagagtatatttgttctcaaatgactttaaatgttttgtcaacattttttttttattggtaaaccaaagagtttgctgggttttagacaatttattttgataggattgttacagtgtgttgtgtgttctttcagctttgattcatttcagtattagaggtcagattcaagtcttctatctagtgttgtttcaggctttagccagaatattttttaatggtttatgctgttcattaacttactgtttcttgaaatttgctttctaatagaatgatgccaatgggtggaatgatgccacctggaccaggaataccacctctgatgcctggaatgccaccaggtatatgttagataatttcattttaatatgatgtacaggctttatttctaagtttttttagacgtctgtgggcattagtataatgaaatttaaaaatttttgaaagttgcaagttcctgtgagaagtgttatatggacccttttttaaaaaatgtattttggtagatatctcggctcactgcaacctctgcctcacaggttcaggcgattcttctgcctcagcctcctgagtagctgggattacaggcgcctgctaccacacctggctaatttttgtgtatttagtagagacggggttttaccatgttgaccaggttggtcttgaacttctgacctcaggtgatccacccaccttggcctcccaaagtgctgggattacaggtgtgagccaccacgcctggctggccctttcttgaagtttgaaatagatgataggtttcaaagcagccaaagtgagtcacggcctatgtgctgaatctcacatacttagagcgcttgtatttgttaggaatgttttagacaagtaatagagaaatccaacaaacttttttttttttttttttttttttttttgagatggaatctcgctctgtcacccaggctggagcatgatctcggctcactgcaacctctgcttccggggttcaagtgattctcctgcctcagcctcccgagtagctgggagtacaggcgcccactaccacgcctggctcatttttgtatttttagtagagatggggtttcgccatgtcggccagctggtctcaaactcctgacctcaggttatccgcctgccttggcctcccgaagtgctgggattacaggcgtgagccactgtgcccagccccaacaaactgtattaaacggtgtaggcattcattgtctcagtcaacaaaaaagtggtagattcagtggctcaatgatatttattaacccatgctttttttgactttgctcaccttagctttttttcctcagaaatgtcatttggttataagacagctcagacaagaaggggtgtcggttgtagtgcactctccattttcttttcttcttttttttttttgagacagggtgttggtctgatactcgtgctgatgtgccgtggcacgatcatagctcactgcagccgcagcctcccaaagtgctgggattacaggtgtgagtgagcctcagcacctggcctcctttttcttctatttggaaccaaaataactttcccagaagctctttagctccttacgtattatgctgtgagggaacctgggaaattaagtatatagaatttggcctataaagcaggaaatacagcacaaggaaagggatttggttggccagcaagatgtgccacacgaggctattagttgtttttttttcttttttttttttttgagatggagttttgctctgttgcccaggctggagagcagtggtgtgatttcagctcaccacaacatccgcctcctgggttcaagcgattttctcctgcctcagcctcctgagtagctgggattacaggagtgtgccaccccacccgacaaattgttgtatttttaatagagatggggtttcaccatgttggtcaggctggtctcgaactcctgatctcgtgatccatctgcctcggcctcccaaagtgctgggattatagtcgtgagccactgtgcccggccctagcctgcgttttatgttggtgtgtttgcaatccatagcatatttagagtactgaaatgatagttgatgtaaatggacacaggaaaaataaagcatcaacaaactatgaataattgccaggcagttccatatacattatgttgtggtacatatttaggtatttaaaagaatacagaataataattgatgttcatttgagaatgtgaagtcattaaaagttttgtcatgttgaggaagtttaaagtatgtagtagtgatgtgtttaactttggaaaagtttttattgttcatgatatttgattcatcagtttttactgtaatttgcactagggttcagggagtatttaaatatctgtcttgtagctgattgaaataattcttttatatattgcaagaagtttgctaaatcagtaggaccagtaagcataattgccaaatgttttgcccatgcagcagggtctagtgttatcttccacttcgtaaaattctgaagcagtacaaaggaagggaaaatttaaggtaagaatgttgcatggggcaaatgcctaagttccttggatttagtcgagtcattgagcagttaattgttaataactttgtagtatagaagcgtttttttccacactaaatttttcagtgactcaatttccccaaacatttcttctctgcaggtatgcccccacctgttccacgtcctggaattcctccaatgactcaagcacaggctgtttcagcgccaggtattcttaatagaccacctgcaccaacagcaactgtacctgccccacagcctccagttactaagcctcttttccccagtgctggacaggtaaggtgaaaatcctgaaaaggagtgcacttatatttaaagataaagtacagttgtttacagaagtctttgaaattttcataggtcaatttttttgtttataatatttttaatattatttattaaatatactaaaaggtggcttatccacttccatgtttacacactgatttcctctacccataaaaggttgaacggagccaaagttagtatgttactttttcatagctgtgaaccctatttattcttagtttttttttttttttttttaagctaatgaaagtttagtatctggagcgtttagaagttttcctttactgactaaactgaatggaaggacaccaaagtcaaagattagcattcttaagacggtagcaaatcatttgtcaggctctgcctctagtacggaacagtgatgagctacaatgccgcacttgtgctaaaatggcgtaatttaatggcttttgacctaggcacactggtatttcttactggtcttttttcaaagcttttaaaagtcttttttccagagcataagtgaaagatgcttctgttctatatggtatacacatgatggttaacacctttgctttttttcctagtttcattgagaagcagattcagatttaatttattcagaatttagatcgggatgtatgtttattcattttcttttttagattatcccttagatttttttaaattgcttttttctgtttgtgggtgctaaattaaaagcattttctttaagtgccttttgttaagcacattaacctagcttttatggtgggtggaaattttatgtattgagagatgtaaaacttttggcaaaaatcttttgtagagaatcattgatacagaattggattgaagtgtcagtatttgtacatcgttattctcagtttcaggtatcattcttgaaataatgcaaaacagtagttttagaaaagaaactagttaactaggttttattgatttagaattaaaattttgaggctcatactttaattttgtttattgtaaatgcattaactgcctgccttttaaaataagtgacatttgattgcattaaattttgcatttacaaatatgcaatctactaaaaagtctaccacatggcttattttgacccatttgtttggagacttttcattgtttcctttcttttatgctacagatggggacacctgtcacaagctcaagtacagcttcatccaattcagaaagtctgtctgcatcttctaaagctctgtttcctagcacagcacaagtacgcaggaagttgcagtttaaaattgttaaaatggctttataacttaaccctttggaccctacttaaaaaatgaatatttttccaaaaatatactgtgtttacttttttaaagcaaaattaatgctatataagtcaaatggtatttaaaaatttgaattcatactaaacaaaactaccccgaactcctgtggttctaaagggttaaaagcatgtaagcagtaaatgcattatagtggccaatggttagcctgatgcatgattaagctattttgatttaatgctgtttaatgcatcacatttaatgtaagaaaatttaatactgctttggttctaaagttggcctagtctacatgttttagatgtgtggtattatgaaaagtaacatatttgttactgataacttgctactttaaaagatcctgctaaattaactcctttgtccatgataattatccagccattgttaatttggaggggattatatatatatatatatatatatatatatatatatatatatatataaagaatactactaaaggatgtatttttattgtgtcaccatttacactgttcatgttatagttagtaacgagtttaaactcatattctgtagttttttttttagctgtttgatagattaataactaattaatagaacattaaaaatagaacacatgctattctaagatactgtatttcagcaatctggaataaatacaaagcattgtaaatttaatttttggtgaggaggtagaagacatctaacaagttaaatatgcagtcttatttccactgctgtgttgtgggtgtgactttaacctagcatcttttgatatttttatgggttatcttgaattttgtggaatgtttatcacattaactttgtattaatttcatttaaagtttggtcctttatttaatgttgatgccttgttttaagttaaactgttgtagatatagttaatttaaggttttgaagtttcgttgatgaagtattgtattttacaggctcaggcagctgtccaaggacctgttggtacagatttcaaacccttaaatagtacccctgcaacaactacagaacccccaaagcctacattccctgcttatacacagtctacagcttcaacaactagtacaacaaatagtactgcagctaaaccagcggcttcaataacaagtaagcctgctacacttacaacaactagtgcaaccagtaagttgatccatccagatgaggatatatccctggtaagttgcttttagttttctacgagcagcatttgatttaaagccattatagcagttcgtccctttaaaataagtgttcatttgtactcagatggtctgtgatctggtttaatgctcactaagtggtttttgccattctgattcttaagaaatcataaaatacttaaagtggacagatattgcatgttttggtcttagatggtttctctccccttcctccagactgtttctaaaagaagacagtaagtcaggttcttaactctcttaaaaatcattttagttaaacataagtttgcatatgttaattgaataaacgttaagtgtgaagtagaatctgcagatcccttaagtcccatataaatgaatgaattttgatacaaagttaatgtttagaatgttgataatggccaggtgtggtggctcacgcctataattccagcactttgggaggccaagacaggcagatcacttgatcaggagttcaagaccagcctggccaacatggtgaaacctcatccatacaaaaattagcagtgtgtagtggcgggcacctgtaatcccagctactcgggaggctgaggcgggatcatcagttgaacttgggaggcggaggttgcgttgagccaagattgcaccactgcactccagcctgggcaacagagcaagactccatctcaaaaaa[140 bp omitted]ctctcctaaaaatacagaattagccgggcgtggcggtgcatgcctgtaatcccagctactccggaggctgaggcaggagaatttcttgaacccgggaggcggaggttgtggtgagctgagaccaggccattgcactccagcctggacaatgagtgaaaccccgtctcaaaaaaaaaaagaatgttaataacaatacttcattagatagtttcttgttgaagcaatttgtaattcccggaaagttgttagccatgcttcaagtttacaaataggtgaagttttaaggtatctagagtttaagtagttggattggtttgtctggcaaaagtaaatagttgggatgtaagggtaaatttttgaaaattactcttaacgttgtaagattttagatgcatgcctttatgcttggtgagcctctgcattcgagtatttagccctgcgcttatttttattcccaggaagagagaagggcacagttacctaagtatcaacgtaatcttcctcggccaggacaggcccccatcggtaatccaccagttggaccaattggaggtatgatgccaccacagccaggcatcccacagcaacaaggaatgagacccccaatgccacctcatggtattcctctttttatgtttttcatatttagtggattttctaagttcacgcataaaatattaaatttatctgcagcatacgttgcacttaaaagtacaatgcgttaacaatctatttttttgtgtttgaaattcttgattttaggtcagtatggtggtcatcatcaaggcatgccaggataccttcctggtgctatgcccccgtatgggcagggaccgccaatggtgcccccttaccagggtgggcctcctcgacctccgatgggaatgagacctcctgtaatgtcgcaaggtggccgttactgatcttacttcatccagtctaataggtttggagattaaaccttttctcaacttgtgctgtttatatagccaagcttccgtcaataaggcttcattgtgactttaacaaacattatcttcccacataccaggaactattggacatttattttacatgggaaaaattatttggaataataaagcaggaacttttcctgaagttgcaatttatactgtatggcttctttttcatgtttcatctaggtttttagaagtgaagtatagtaaatttggttcgttaaattgtgaaggcgctggaattacatgaacataccaccctagtaaaggcaagttctgtaagcttacattgctatttgtaaagtttgccttcacagcatttcagatgctgttggacttcatgtccccaacctagcttggtgagggctgtaactgtttccaagtacttgtacattggaagtctgaatgtgtaacaatatttaatgtatttagagttcctcatgttgcagggtttaagaaatctgacccaccaaggtcatgtgacttttctgtactgttaaacttcattgtaataaaatgagagaaaaatttatgcctttttattcataacccagctgtggaccactgcctgaaaggtttgtacagatgcatgccacagtagatgtccacataataaaattcatagttaccaatgcagttttgatatatcattggattctgtctttgagttgtaggttatttcttagctgcatgttttaaactgaatttgcatagagttgtatgttaatgtttcagttaagagaaaaacttaagatacatgagtcattacataatgggtatgaaatctttataatcacccttccaccctctatggtgtcagtacacatcacgtgtcatagatacttaaaatgtaaatgttaacacttttccttcctgctgagatgtttagagcctagtgccagacccattcatttccttttgattatttttgagactcagtactgcatggacctcagaagcttttcaggtgcaaacttctagaagcttaggtgcatgcagtaatagcttcttgtgctgttaatgggttattatatattattctaagtgtaatgctgagaatctaaatgtgtctctgttgggatggttaacagatgaattggcaatttttattatgttcctggaagattacattattcatttgagtaccttctgttattaagcctaggtagccttactgtgcaactttttatttatccttggaaattttgaatgttgtgttcttacagagagcttttctgtagagatgactgctattcaatattttgtgttgcaacctcttaaaataatagctcttgttgacctttttgggatctgtttttctgatcttttgcagggtagttttatgattttttaggcatcaaataacctatgcaaagtattaatataatgaactcaagttgagtttttctcattataaagttaagacttctaagaaaatggtaacatttctttataactttcctgtgaaggtatagataaaacacatgaagtctgaagttgtatggaaaaaagggctttaactttgaaggaaaatatattgaaaagtgatttagccatcacaaaagagttcgtatttatgtgacagatgaaagtcatacctttaagcaaaacattgcaagtattataaagctgaatgctattttaactcacattggctgggtgcagtggctcacgcctgtaatcccagccctctggaaggctgagatgggaggattgcttgagtccaggagtttgagaccagcctggccaacatggcaaaaccccatctgtacaaaacatttaaaaattagccaggcgcgttagtgtgtgtctgtggtcccagctgctcaagaggctgaggaaggaggttcttcctccttccgaggctgcggtgagctatgttcactccagcctgggcaacagagcgagactctgtcaaaaaataaattaaaatatctgattatctggcttcaatgattttggctcctgtgcttgtggtaccatagtggtacaaaaattttcatagtttgaaaataaaacaggtattttgccagtaatgtatttctttctgccagcagccaagtcccaaaccactttcccctctgaacctctgcttacctaaatggtttcaaaattaatacatgctgctttgatttggcagcacacttaatatactgctgaaggaaa[137 bp omitted]ggtgaaaccccgtttctactaaaaatacaaaaaattagctgggcgtagttgcggatgcctgtagtcccaactactctggagaccgaggcaggagaatggcgtgaacccgggaggcatagcttgcagtgagcggagatcacaccactgcactctagcctggacgacagattgagactccgtctcaaaaaaaaaaaatgctgtgattaaatttagaataattaagtaaggggtgctctcccaaattctcaggaatttcatgtatacggttattgacaaactgcaatagggttagtagacctgtttcagaaattatgtgaagctttatttgcattttatgcaaagaaggttgatactttgtagcaaggttttttgctctctgtataggtctgatgggcaaaaatggaacttttaaatatgggatagaattctaattaaaaattaattgaaagtgttaggcattggcagataaaacttaagctcatgagttcctgagtttgtagctataggctcagaggtggtgtacccatttaatatatttgaagtgtaatttttgcatgcatccaaacgtaattaagcttctagaaaataccttttttctaaatgcttctggggtccatagtgtggttgaattatgagtggagcaaattatattcatataattaactctgactcaaccttccttaagtagtagatgaagttgagtcaaagtggatgccaactgccctcacagaagacaacttttgggacttgataattcaggcaggcattgtgattgtcataattaaggaagctgtaaggttagtagggctggcaactttggctctaccttacatccaccccttttagaaaaacaagaaaacattttgtctggcactagtttctgttgtataagttttcatactgtttaacaagaccacagcaggtaaggattaatttttgagtggctgctggaattacttgatttgaatacttagtattttagtagtgtctcacacatttgccattaggtatgaataaaatattcctactgtactcctattccactaagttacattttgaacttagactcaccttaattaaacttaattaattggggagggggattccccaacaaaaagaagtacgggctcagagtggaattgtagtggacaatagttaaaaacaaagctgctccttttgcttgcttgatcattgggatttttaaaaaaaaaaattttaatgcatgtcttttaaattaattgggaactgtttttctaaaattaaaattttcttcttcctatagccctgccataggacaggctgaggctgagtctcagtgttgccctgttcagtctgaggcaagtgggatttattttattccttataggggctttcacagctttatggctgttggatatttatgtccccaaacttgcagcaagtttggtgaaggcccctaaatttaattaaacttaggatttttatactcttttggcagagaaggctctatattaatattcacgtttgactgtggtgttaataaacataagtatttcatatgcaattttatgtaatttgctgtgtgttacataattaacagcttcagtaaagcttgtgttcctatattgaacttcaataaattgacaaaatttgatatttttgattggaggcaagaaatgtttcattcaagttttttactttcacttctaggaaaatcttactggttttattttctccataaactattaaatttaacctcaaggataagtttaatcattggaaatgccactggatactgaaatgtgccttctcttttttgagacggagtttcactcttatcacccaggatggagtgcagtggtgcgatctcggttcactgcaacctctgcctcccggattcaagtgattctcctgcctcagcctcccgagtagctgggattataggctcccgccaccacatctggctattttttcaatatttttcagtagggatggggttttgccgtgttggccaggctggtctcaaactcctgacctcaggtgatccacccatctcagcctcccagagtgctggagtagcaggtgtgagccaccgcgcctggccaaaatctgcattctttttttttttttttttttttttttgagactgtctcgctgtgtcacccaggccagagtgcagtagcacgatctcagctcactacaacctccacctcctggattcaagcgattctcctgtctc[215 bp omitted]tgaatgttaaggctaaaaggtcatctggaaatgcttaattttaaaatattttcaagcctcaccacattagagcaaatgttaatgtagagccctgtaaaggtgggaaggtggtgtctatgtgtgtgcttgtgtatgtgggggtatagaccatatagttgatataacaacagaatttgggtgttacagacctttcagcatggatggattactaattttcaggtatcgaaactgaaatttgatacctgatcctgtggtaaagtatgttaaactatggttttggagtgattattttgaggttcattttcagcctcactgaacagtgttttacgcacatgtgaaaagtatccacatttgtttccaactaaaatttgcttttatttggtgagaaaagttgtgtgcgtgtgtttgttgtagggaataattagggaattggaagagaggccaaaaacaaacctgaattacttttgtttcttgtgtttgagccacgattctatccagatagcagtttactctgagcagtaacaatgaacaagcagtatagcatttagcaaacctggaattgtttgtatatggttttcattcttggaagcataaagaaaaaatatgcattaaatgaattgtaaattttgacttgttaaataacatgtttttcactataactaataggattttaatatttaaagaattttgttgcttccatgacaaaatatcccattggactattttataacctcagtaatcaacatttaagagtccttaattggagatctgttttctctattacctaccatcctgcaatatgctgaaatctttctaagttgcttatcttaattctaatggtgataattgaaaaaagtgtgctggaaatacaggctcttatctggttgagtactgggggtgggaaggatttagtaatgtcataatctgttgaaggtaatatctatagataactaagatagttcctttttttttgtagttctgtgactcagacaaataagattttgagaattatgtagtttttaggtgtctgtaacatccactagtaaaacttggcaaatgaaagaaaattgtgaagtcaccactttaactgagtcaaaattttgtttgaataagctgatgaaaatagacatgtaccctagaagtagatactctaaaattatacagacatgaatgtcttttttaaaaggttgtcattattgacctaatattgagtaatctttctgcgttattccaaattgaaatttgtttgctcttcattgtaacttttatgtaaaagtcctttaaaaggggattcaattataaggctatttgactatagggcagatttttataagtaaacattcccccaattccacttatgctaactgtctcatgacagtaaagtttactcctttttagaaaccctttctcagtattttaatttctgtcattgaatcatttaaataataaccttttgtttttatagcaaagaaatcatctgacttttctgtgtgatgtttcttggcaaaataagcacttgatgtatggtcatgtacataatggatattcattaattttgtgattagtgctgagttttctaaactactatcttaagctcttaggcaccctattatggatctaattcaaaccaatatgtaggaaatggagaaagtaggacttcagtttgcgcttcccaataactttaaatatatccaccttttccaagtgtttaagccctaaaacatctatctttatttttttacctggcatttttgttagaaaatagattacgttttaaagtaacattaaaaaaattcttcagtaagataattgcttttaataagtatatttttcttgctcttggctctatacatttttgcataatattttagtcttgaaaagcttttcattttcttaactctggaaaataatagtttggaactaaattagtttgagaaatctgaatcatctctctttaaatctgttcagttagtctcatgtattctcaggggaaaatgtctttattttactaagcggaagtagtagtcatattgaggcagaaatttgtagcccaaacaaggtaggtcttcgctgaaactaatttgaactattcctatttgaagcaaattgaacactattataaatctagactggctaattagatggaaactttgatggttaggttctttaagaggcatacaatccgttatgagaatgtttatgtttatgttttaatttttatcaaaataacctcagaggaggtacatgtgagtaaactgtcttaatggttgattacttggaacccacccattaattctaaatgatgtaatggtctataaggtagtaatctggcacagcttcagtaatgtgtgctgtgtttgtaaaaaggtgaagtactttattggcattttctaagccctctgacattgttagtgtctgggttggttggtttgcattttactattatggtggaatctgtgttccttcaccattggttaagtctgaggaactaacagtgaaattcattgatggccaacttggataaaaatgaagaatgatattttcccagtttactacacatggaccaatagtgattatttgggagagaacactgggtagtattgtttgacttaagaaccttaaatatattgaaaagtaatggcattcttgctcatgatttgcatttgttagtgaggtctcaccatagtattttaatgtagcttcttattaaaattttattcataaatagtttagcagtcacagaggtgaaaaaaaaaagatttgcaccatcatatccgagtctttactaataaaatgaggctgcttaagtacccaagtggagcaagggaagagttactacagttactgtaagtctgagttagaaaaaatacagagcatctagttattgagcaaagcccccttttacctgttcgcttattcaaagagaaacaatagaatttgcttctcagtacatgtttttaaaattgagaatctctgatgtgacaaaatcaatttttacaaaagttgaattaaaaacttttaaaaattgcttgtctttgggggtatgtctacatattcgtttaaatttagaaattcccacatgtttaagatatatgcccatcccctttttagagtaatcaaaatttctatcacagttcacatactggaatacatagtaaaattgagatgtgtccaagagattttcaatgttaattagctcattctaaatagccaatataaggtaacttctgtttaaaaaaaaaaaaaactagggaaaagttttaaatgtattagtatcaggctctgaggaaatttaatgcacattgactttttaaactatggattgaactcctcagtttaatacaatttgtgtttttgttaactagcagcagaatttcagcatttgctacttactggtagagaagaaaaatcccacagccctgccagtacaggttagtttaatctgtaagtacctgatgttcctatttttttcaaacatatccatataactcacacaaggaagaaagctgtgcggttacttaaatgttagtataactaataatagatccattggacactttaaacactcagtacttgggccaaagtagatctaggtttgctaaccccagttgtaataaaggtgtaatactgctcctttgttatctccttgtggttcaacctaagtagatacattgtacataaaaggaaaagacagtttcagttggctatgcccttgttgatagatgatatggagtccagggctttgggtccagggtcttttacttaagctatttcatggtggttctctcattcaccttttaactttttacattatgaatcaacctaagaaaaaaggcaagtttcctcacatctagaaatgataaatggtgtacagtcataagctagaatatgtttttataatgcttttttgttcttttagcaacacttgtaaatacaagtactcctctatttttgttctttttttgtaaactataacgtatcccgttggtgtaccagtgagttcattttactgtaaactaagaataacatacctttttaatactgaaagttgactactcatcaagaaatgtagctagattctttatgtaacacttttgaggggcagtggggacataatgggttgtggaaaatgtgttttaacatttttattttttttttattctacccgagttcattgttgtttgaaccatcctctaaagatttcctttaacctctaaatgttgtgcttttaggttgataacaaatgtaaagcactgaggagggaggaataaagcatacaagttaatttctaattttcgcaagcctgaaccatcctaatctgatagtaggatgtatggcttcttccttttcaccttgtgtgatgtttaatttgagacgatctagccataaaactagtaatcttgaattcctcttgagctggatggtgattagccattgtgaaaacagattatatggaaattgtgcatattgctaaattttaaaacatggatttatcaactgataataaaatatatcttacaagataaccacttgttttttaatgtaaaattgcacaagggcttaagtttcattgcctttcacagtttaatctgtatatgaaatggtgtagatacagtggaaatggttttccttaaaaccatctctttaaagctgcctttctggtgagtactgttttatacttttatatattataattttatcttctaaaattaactgaaataggacactttgattaaagaggtgagcactctgaatttctacatctttggatattacttgaatcaagaatattagaaaattattttaccacctggcatttcccttttaatttgctagttcacttttttctgaccttcacttaacagactataaatacaaaaactttgaacacataaattatttcattttggtgagatggaataaatgtttaaaattagtatttaagaaagttcttaaacattttttttagttggcagccaaaagatttttcttagtgctttggagacattgcataggtgtaaaattaagataccagaacttcattctgttcttgttgaagctgttgttgtggtgattcatgagcagtaagctggagttagagtggaagaagggtttaccaaaattcttcctgcagactagttgcttacagggtttctttgagaggcttaaaaatttcaaaagtattatttaagccactctaaccctgcatgaaaaattggagttagaaatactgatttctgagaccacgtataccagtgaaaattagcttctgagtaaatttctaatttatgccctgctttatttagcctcgctatatgtaacacatggattattttttccctctagtttttaactatatcctagattaaaaccagcatatgctaagaatgtttttacattctgtttcctcctgtgatctttctgaaccaataataaacagtcaactgtgatgctttttagtatgaacaatgatagttttctaaaatctgaaaatcaatacctgagtatgtgatgtggcaatgcattcttctagataagcactaaacaaagtatggaccctcaatttatgtctttaagatttaaagtgaagtaaatttctaaggaactgtgtcctttcctagcaggaataaacagtgaaaatttggtaagtatttaacttgaagtgcatgtaatagtgatgagagtaagtagccaaatttccgtaatataaggtaatgtttaaaagtgagcaataattattgcatctcttttgcgacttcatgtagatgtgattaacattttttacaaatttgcctgcataaagattaaattggaacataccttactcctttgtctggtttttttattttgtatggtgctttaaatactaattttatatttcaagctttttgcagggtagaaataagtggctgttaaagaaaatatcttcaagaaggattatttcagtgtccctttttaaaactcgatgatggctttcagtttatttaagtcttctgtttttcagctccagttaaaactgacaataggcagctatcaaaaatggaaaaaatcttgtgctctttctggaatattagaggaatcagttaataatagtaaagtggtattaacccaatacttgatttgcagtttttaaagcagtttttaaattgagagaaaaggggctgggcccagctgag[132 bp omitted]gaggcaggaaaatcgcttgaacccagggggaggaggttgcagtgagccgagatggcgccgttgcactccagcttgggtgacagagcgagactccgtctcaaaaaaaaaaagaaaaaaagaaaaagtgataagatttgggagtctattccctgggatgttctattaataataaagtgataataaatgaaggttaaagtcaagtgttcaattactacaccaggaaagattgattatttctgaggaaaaggtccatttatttccaaactagtctgtagtggtttagagtaagcattattttatgaagtggtacaagattgcaaaggttagtaaagggacctgtctgtcaggtcaatcttcggtcttcacttttactggcaagggattatgtgaagagtaagtcatacaagggatatgattgtaaggaggtcctgaacaaagcatgataaatgttagtccatgtgtattattaaatggtctaaagaaaaatcatgactgatcgcataatttttaatgtaagtaaatgagctcactaagggtaattaaatactagcttttaaaatttaaagttctcacgaatattagtgcatcttgtcactttgatttgtcacctggttaaatagctggaagcttgtgcaaatgaaaaatgaaatggaagactacatttgtatatatatctgtataatttttgtttactagtaggttcagagagagatctgagatgttccttaacatgtagccatgtaattagaactcacaaggggcattgaaatgtttttctttttcagatagtctggggctatttacttattttaagtaagccaagtctaccatttgaaaaatggtgctttatttccatatctgaagcctgaagttattttttagtttgttttcatctaaaagtggaaagatttttgcttctgcgttattaagagcctctttgtttggaggagatggttatctccttcactcattaacctttgagtgcttgttatctacaaagatgaataaaatctttcatttattatttatgatacttgtctgagcccattttttaaatttgtatccagaacagttatatattaataaggtattatgatatgcatcagttgtcctgagcagtttttgttgtatcctgggaactgtaaggaataattattaaatacagaatgtctacggggaaaaggggtaaaagagcacgcttagtgtgcatattttgtatgtgatagttgggtaggtagatgagccagaagaaacagtgatttagagtgagcataaaactagatcttgcaaccaaatccttgcttttctattatttattagttatatgacctggaacaaattacttttcaaatggtagttataagtttcataggtttgtgagaaacaagtaaatatgtgtagaagaatttggcctggcaactttgtaagtgctcagtattttctgtatgtttacttgaaagaactaacacactatacatttgtgctaaccttgttagaccacaggcaatggtgggagcagacagttattgcaaatcaaaaaatttcatttagcacatatatatgaatgcccacagtgtgctttgatattatcctttgtacatagtagagaggaagtgcatctgagtagagactttggaactgaggatttaagaagccagcctttgcacaaagtctcattgagtaacagtgttttgggtagtaggtgtgcagaaaccatgagatgggaaacataacatcttgaacaaaaaatgaggtttgaatggtgggtgggatgggtgcgtgtgcatgtaaggtgagtggagatgggagagagagagaggccaagtctcacaatggaccatggtttgaatgtcattctaatggaaatcttttgaagaacttggagctggtgagtaatacatggtttatgattaacagattatcctaagttggttggcagtggggcagggtgggttggtgggcagtatgaggatcagttagaaggcaagaagaacctggccccaaacatctcaagagtaactgatgtaatgacttactgaatagtcatgggagaagttagaagatgctaaccttgaatgtgtgaaacacaggaaaaggcaaaaagcaaaatattgatgctgggtacagtgacttatgcctgtaaactcagcaactgaggctgagttgggaggattgcgtcaggccatgagttcaaggctgcagtgaaccatgatggtgccactgcactcgctggtgcccgggcaacagtgagacccccaactcaaaaaggaaacattggaaatacagtgggttggtttgggggattttttgtttttttttgtttttgttatttatttgtttggacgctgtttaggctccacctaatctgtaagacttatttaggaaatgtttgttggagatcgagtaagacattgagaggcaaaaaataagtttcttcaagagtctaagaaggatacatcagtaacaaagtgaaaatgccctcaaaggacgtaaaatttggagaaagcaaattccatctatgtgatctcaggatggtggcatttgaagtaggtcttggattgttaggatttgggcaaattggaaaaaaacgtgttagaaaagagatgggaaaacccaacagtatgaggcttatgaaggaaagttctaaagaatgaggtcattggagtctaaagtgtaaagttccttgaataccacattaggcatatacattttctctaggagttggggtgtcttgggattcttggcataaaaacaacattaactgcctgggtgtggtggctcacacctgtaatcccagcactttaagaggcttaggtgggcagattacaaggtcaggagttcagaaccagcctggccaacgtggtgaaaccctgtctctactaaaaatacaaaagttagccgggcgtggtggcaggtgcctgtaatcccagctactcgggaggctgaggcaggagaatcgcttgaacccggaaggcagaggttgcagtgacccaaggtcgtgccactgcactccagcctggacaaggagtgggactccgtctcaaaaaacaacaacaaaaaaacatcgactagagcagtggctgtggttttggacccagtgtgtcttcagaagcacccagggtatcattataggctgccactatttcctggtaccacaggatatttccatatcactaccatctgggtgacagggaataataaaatttagaaactgtaactgggccggacagctattgacttggtgagttgaaactagaactatcttatgttcagtaaggccagtttaaagtgttttggaagccttatatatctgaggccattgtacttcttggtcactttacaaactaagtttcttaattttttactattccccacaattataggacattgttctgctcagaaacctttgttatcaccacataacttgtattttgtagtaacagaacacccctctttctgaattcttcatggaactttcctgaaagctggttctgagtctctaccaatgtatattcatacattgtgcatgtattataaccatgtacaatggaagtgagcaatgtgtaaccatatgtctcagtatttgctaggatcatgatgctatgaagcaattgatagtcacccttttcacttattccccttgctattccacatcactgcttttcctcatccgtcgatgccataaacagtttgtctgatggctttctgattcatgaagatggtaaaagccaaggccctcaacctaccatatctataaaatctgtatttgcatccttttttattacattgtactaggcatccattaacagctctcctcttttgctatgctctggaatccaacttttgccattgtagtggtctccttgttcgttcttgtgtttcttcagcttcctatcctgtttttgtttttgtttctgtttttttttttttttttttttttttgggggaggcccaggctggagtgcagtggcgcaatttcggctcactgccacctccgcctcccgagtccaaacggttctcctgcctcaggctctcgagtagctgggactacaggtgtgtgccatcacacctggctaattttttgtatgtttagtagagacagggtttcaccgtgtta[135 bp omitted]ttggataaaataggagtcaagactgaggctcaggttttacctctgaaaactcttggctcaaagacccttaataatctgactcctgcttatctttccaaaataatttcttgccgttctcccttggtacttggcttaaactctcaacaccctctctgccccttagtactttgacttgtgtaacttccacttcctcacatctgccaaatactagtttagagttaattccctcttacaaatccctgatcctctgtgatgaccttcgtatgtgctttcattgcattatgtacttaccatcaatttgtgtgtttatactggactgcaacctcggacgcaggactgtgtcttgttcatttcattcctaaaacttagcacgttgcacgacacttaaaaagaggcgcttagtaattgctgggttaaattgagttgctagtaatggatttattattattattattattattattattattattattattattattattattattattttgaaatggagtcttgctgtcacccaggctggagtgcagtggcgcaatctcggctcaccacaacctccacctcccaggttaaagcgattctcctgcctcagtctcttcagtagctgggattacaggtgcacaccaccacatctggctaatttttatattgtttgtttgtttttgagatggagtctcaccctgttgcccaggctagagtgcagtggcgcagtctcggctcactgcaacctccacgtcctgggttcaagcgattctcctgccccagcctcccgagtagctgggattataggtaaaccccaccatgctgggctaatttttgtaattttttagtagagacggggtttcaccatgttggtcaggctggtctcgaactcctgacctcatgatctgcccacctcggcctcccaaagtgctgggattataggcatgagccaccatgcctggcagggttaatttatttcatcaaaacagactaaaggtttagagagatgtgcctttatttgaatattgtgcagtttaaacctgactcagtcatgctgtccttttgagcaggatctttagaacagatacttgtgattggctaaagaataacctctgacaatagcaaaggtctcttggacagagctgttaaaacaaaacaatgaaatctgtatttgtttaagattagaaggatttttgaaaagtaacttttcctgcggcatgtctgctagaataaaaggttctcgttttattaatggcgaaagaatagctttagtttggaatagaggtaggctagaccagtgattgcaaactgaaacacctacgagaaccagataggttatagaaatgagtgaaacaagccaattggggagtggggaactcgtgacccttacaaatgaggctcatgctgggtgcattgcctggccacagtggccagctttcagtttttttctagagaagttagatctcatagttatttaaagagaatttaaacactgtgctaatcacacctgcaggacagtttttcttgtagatcaccagtgtgggattttttttgatgaaagctgatgtttgcagaaatttatatcaacaggaggaaagcaagataatcccagagaggaaggtttgatgatggacaagaggtagatgatggagtatgatgttggggaacaagccactgaatagactggtgcagttgaaccagtaattggctattgtgatcgagctgcaggttgtcggtgtatataattatataaattagtgtttggcatcaatatttcagttcctagatgggcttttgggaaatgcagtatcccaagggactgagatcacaaaagtaaaatttcagaacaatcaatgaacatttttggatggggagggacctatcttgaatatagtcataataggtgactaagtttattactgtggggtttgaaagaggttattttacctatgattcatagtgcttggcacctagtaggcagtaagtgtttgttacattgagtaagtatatctctgtgatgccatcctcaaatcaaagaaagctatgtctgatagctgtcagggtgttggcaaagcatactttagtcctcagtttctcagtaaatagtggtgagacaaaaaggtaaaatatttaactccagtagttcataattaccaagagtatataatcttttacctgctttctggaaatttgtacaaagtccatactgttccttttcttaaaagtacgttttctttatgtttaa[132 bp omitted]gaaaccccatctttactaaaaaaatacaaaaattagccgggcatggtggtgcgtacctggtcccagctagtgcagaggctgaagtgggagaatctctttgagcccagatcgctccactgcactctagcctgggtgacagagtgagactcttgtctcaaaataaatataaataaaaatctaatgtggattaaacgaaagaaattgttttctgctctactcccggctacagtccccaggaagaactagatttgtcccttgttatctgaagactggttccaggacttccctttgatactaaaatctgcagattctcaagtccctgatatgaaaatgacatagtatgtggatattacctatgcacatcctcccatatactttaaatcatctctaaattacctacaatttttttttttttttttttaatgagacagggtctcacacccatcatccaggcccaggccggagtgcagtggcctattcacagctcactgtggccttgacttcccagctcagatgatccacgtcagccgcctgaggagctgaaattacaggcacacaccaccatgcctggctaattttttgtatttttagtaaaaatgagatttcgccatggtgccaaggctggtctcgaactcctgggcttaagtgatctgccagcctcagcctcccaaagttctgggattataggtgtcagccaccgcatccagccctgtaatacttttttttttttttttttcccagacagtgtcttgctctgtctccaggctggagtgcagtcacgcgatctcggctcactgcaacctacatctcccaggttcaagcggttctcctgccttagtctcccacgtagctgggaacacaggcacgtgccaccacgcttggctaatttttgtatttttagttgagatggggtttcaccatgttggccaggatggtcttgatctcttgacttcgtgatccgcctgccgcggcctctcaaagtgctgggattacacgcatgaaccactgcacccggcctaatacaatgtaatttataagatagactgataccaacagctaataaataatagaacagttataacaacatactgtaataaaagttatgtgaatgtggtctctctttctctctgaaaatatgatactgtactcatctgttttcagactgcagctgaccatgggtaactgaaaccatggaaagccaaatctcagataagggagaactactgtacagacacttttttattgacctcatctaggcagcctcagttttgttttgtttgctttttgagatggagtctccctctgtcccccaggatggagtgcagtggcatgatcttggctcactgtaacctccacctcccgggttcaaacgattctcctgcctcggcctcctgagcatctgggattacaggaagtttatttctatctttatccagattgctggttttgcaatgcctctttgcacaagactttctctggctcactttgttatgttccctctagaatgaggctctggtaagaaacatccctgtttgctaccctagtagtggaaaaaccctagtcctggaaacccaagacacctgaattggttcttcccagctccccctcaagagagggagacacttttagcttgtattttggtttacgggttaaaagttttatattaggatcagaatgattgcatctggtttgaagactgaaatttctttggacagggtcttgctctgtcacccaggctggagtgcagtggtgtgatcacagctcaccgcagccttgacctcctggactcaagcaatcctctctcagcctcccagagtgctgggattacaggtgtgagccatacacctgggcctaagagttgaatttttaaaacctacttaaaattactgtctttgtaaaaccgtatgaaattagaaccagaagttgccttaaagatctagtctaatcagtctaatctcattttgtagggagaagatttgcttgtaatacctgtaggatatggcaaagtagaacatgtaaccctggccacattggctcatatatgtgatcccagcactttgggaggccgaggcaggcggattgcttgagcccaggagtttgagaccagcctggccaacatggcaaaaccccatctctaaaaaaaaaaaaaaaaaattaaaaatgagcaaggcatggtggtgcgcaactgtagtcccaggtacttgagaggctgaggtgggaggatcatcttaaccccggggagatggaggctaaaatgagctgtgttcacaccactgtaccccagcctgggcaacagaataagacgctgtttcaaacaaaaatgtgtaactcaaaaacagcaaaatgcttagttctttgtaaatgcaacattttaggctactgtttatttgccaatagaacttttttttctctctctctccttatttgtaaacttagctatatatgtttcttactctttggtcttgtttacttcaaaatctttttagaagttgaggagattgggaggcccaggcaggtggatggcttgagctcaggagtttgaaaccagcttgggcaacatggcgaaactccatctctacaaaaaaaatacaaaaattagctgggcatgatggtgtgcatctgtagttccagcttcttgggaggctgggatgagaggatcacttaagcctgggaggtcgaggctgtagtgagctgagatcacaccactgaacttcagcctgggcgacagagtgagacagccaaaatagggggaaaaaaaaaaggtggaggacagaggcatcctaaggtgatgggacatttttcttttaattttaattttaatttttttttttttgagacggagtctcattctgtcacccaggctggagtgcagaggtgcgatctcgactcactgcaacctccgcctcccgggttcaagcaattctctgcctc[135 bp omitted]ccctcccgaagtgctgggattacaggcatgagccatcgtgactggcttaatttttatttttttttactcatgtacatgaatcaatttttatttctttttactgaagtgacatttttcatctttatactgcggatttgtaattcagatttctaaaatattttaatcatcaaagacaattgtttcttttttttaatttttttttgagacgaagtctcactctgttgcccaagttggagtgcagtggcatgatcttggctcattgcaacctccacctccccggttcaagtgattctcctgtctcagcctcctgagtaactggaactacaggcgtgtgccaccatgcccagcaaatgtttatatttttagtagagacggggtttcactatgttggccaggctggtcttgaactcctggcctcgtgatccatctgcctcagcctcccacagtgctgggattacaggcatgagccactgtgcccggccaaagacaattattattaatttatgtatttatgtatttatttatttatttatttatttattttg[320 bp omitted]cttaaattttcatgcattagggttttctcaagaatgtactgtcctcctgaaaactcttatttgcctatatattatactttacatcttcaactcatttactaataagttgttagatttaacccaatgtcttccttgtaatttccttctctccagcacaactagtgtacttatgttttcttgatgttaatgaagattggtaaagggtacccggtacaattttaaaaatttaagtgaacccagctgatatatttgccttaattttattgctgacagactacatctaaatatgtgaaagaaaaaaagtgatactcataacttcagaggtttgaaatgtatt[131 bp omitted]tggtgaaaccccacctctactaaaaatacaaaaaaaaaaaaattagctgggcgtgttcgtgcacacctgtaatcccagctactcgggaggctgaggcacaagaatcgcttgaaccggggaggcgaaggttgcggtgagccaagatcacgccgctgcactccagcctgggtgaacagagtgagactgtctttttttgttttgttttgttatggagtctcagtctgttgccaggctggagtacagtggcgcaatcttggttcattgcaacctccgactccctggttcaagcgattctcctgcctcagcctcccaagtagctgggattacgggcatgcgccaccgctcccagctaatttttatatatatatattattaatagagacggagtttcaccattttggccaggatggtctcgatctcctgaccccgtgatctgccctgtcagcctctcaaagtgctgggattacaggcatgagccacctcacctggcatga[137 bp omitted]catggtgaaacctcatgttgtctctactaaaaatacaaaaattagctgggtgtgggggcaggcgcctgtaatccccggtactctggaggctgagccaggagaatcgcttgaacccggaggcagaggttgcagtgatccaagatcgtaccactgcactccagcatggggaacagagcgataatctgtctgaaaaaaaaaaatggaataatacaaaattatactaagattcattcatgttattttttgtggctgcagtgcattcatttccactatatagtatttcattgtctgatgtaccagaatttatccactctctttttgatgcatgtttggatttgcagtcttttgctttatgaaaagtgctgctgtaaaaattattattatctgtctcctgatgcatatgtgaaagggtttttctaggagtgaaattgctggataatatgtaaataataaacataagaaaatgtcaaattcttttccaaagtagttaatcaagttatactccaccagcagtgtataaggagttctcattgatccatatcttctccaacatttaggtttctcacagttttacatttttttgccagtgaaatgtacataaaatgtatcttatggtttaatctttgtttttttttaactcagtctttctgcttttattctttattctctattgaaaataatttggtttagatttagacttagattgataaaattaaaaaaaaaaagaatttgggctgggtgtgttggctcactcctgtcatctcagcactgggggagactcagatgggtgcatcacttgagctcaggagttcaagaccagcctgggcaacatggtgaaaacccatctttattaaaaaatacaaaaaaattagcgtagcatggtggttcatgcccatggtcccagctatgggggaggctgaggtgggaggatggcttcagcccagaaggtcaaggttgcagtgagccaagattgtaccactgcactccagcctgggcaaaacagccagaccctgtctcaaaaaaaaaagttattttttttttgttgttctgattacaaaattagcacaaatatattcattttcaaccaatattatgggctataacatgtttcagggtcctagggaaatacattaggtaaacaaaacagacgagcccttcccctcatagagcttccattctagttttggagattaacattaaacaaagaaaataacttaatttcagatactgataaagtgccatgaagacaaaaaaacagagtaaaataatagtggttggtggagttgggactcctttaggttagaggaaggcctttctgaggaattgaatgatgtgtgagctgtatctaagtgatcgaaaggagccagccatgtggagaaggcacaggacgagtgtcttaggcagtaggagcaggaattctaaaggtcaagagatggggaacaaactggtcaaaattaaagaataagaagaaagcaaggcaggcacactggagcatgcctgtaatcccagttacttgggaggcagaggtgggaggatcacttaagcccaggagtcaagaccagtctgggcaacatagcaagatcccatgtcagaggaaaaaaatgtgtataaaagaaagcaggccaggcgcggtggctcacgcctgtaattccagcagcttgggaggccggggcaggcaggtcacctgaggtcaggagttggagaccagcctgaccaacatggagaaaccccatctctaatacaaagttagccaggcatgttggtgcatgcctgtaatcccagctactcgggaagctgaggcaggagaatcgcttgaacccaggaggcagaggttgcagtgagcctagatcacgccattgcactccagcctgggaaacgagcgaaaactccatctcaaaaaaaaaaaaaaaaaatcagaactcacccttaatccaaccatccagagataagcatattaacatttttttttgtttatttgttttttgagatggagttttgctcttgttgcccaggctggagtgcaatggtgcaatctcggctcaccacaacctccgcctcccgggttcaagcgattcctctgcctcagcctcccaagtagctgggactacaggtgcacaccaccatgcctggcgaatgttttgtatttttagtagagtcggggtttcactgtgttggccaggatggtctcaatctcttgacttcatgatccgcccgccttgacctcccaaagtgctgggattacaggtgtgagccactgtgcccggccaccatgtaaacattttgatgcaagttctttttttttttttttttttttttttttttttttttttttctgaaatgggattcttgctctgttgcccaggctagagttgcgatggtgtgatctgagctcactgcaacctccacctctcagggtcaagcaatcctcctgagtagctgggattacaggtgcgcagccacgctcagctaatttttgtattcttaatagagacggggtttcaccatgttagccaggctagtttccaactccttacctcatgattggtccacctcagcctcccaaaatgctgggattacaggcgcgagccaccatacccagccactgacaagttcttgcacacgtttctctatgcgtctttggtatttccccctattttctggtgagttaaatggtagggtgtctttttattttattcatggttacttttttgtagtaatattaaataatattacgtgaatgttgtatgaaagtttattgtggctttattcatgaattgtaacatttaccttctgctttgtagccacaattactattattatgcttatttttctttacaagtctaaatattaactgttagtcctttcacctcacaaattccaaatcaaaagtatttttttcttattaaataaagaagttggttgcctggatgatatcttcaggtatatttttcttacgtttatgtaaaatacatagaacaaaatttaccatcttaatcatttttttaaaatttatttatttattttttcgagacggagtcttgctctgtcgccaaggctggagtgcagtggcgcaatcttgactcaccacaacctccgcctcctgggttcaagcgattctcctgcctcagcctcctgagtagctgagattacaagcgcccaccatcacgcccagctaatttttatatttttagtagagacagggtttcgccagactggtctcgaactgctgacctcaggtgatctgcccattccagtgaatccacagaaaattttaggatgctggcaggcaagtgattgaaattttgtgaagtcttttcttttatctttcttttattttttgtatgtggcaagagcttctgagaaattcatttcctctatcagaatttggctcttccttgcttccacgactctgctatttatttgcccctgttataatacatatatagtaaagggagtaaaacaaatttaaaataaaaaacgtattaaattataaaatatattcctatttttataaaatgtagaaaggatatatgacttctgattgagatgttaaagtgagctcaacttcaacacaattcctctgcctcaaacacgtagcaataaataaatgttgaaaaaggaaaaacatatgactaaaaatagaagagaggccaggcacgttggctcacacctgtaatcctagcaccttgggaggctgaggcaggtggatcacctgaggtcaagggtttgagaccagcctggccaacatggcaaaaccttgtctctactaaaaattagctgggtgtagtggcatatacctgtaatcccagctactcgggaggctgaggcaagagaatcgcttgaacccatgaggcggaggttgcagtgagccgcgattgtgccactgcaccagagcctgggcgacagggtgagactcaatctcaaaaaaaaaaaaaaaaaaaaaaaaaaaaagagaaagctctagtggcatgtgaggctcacagtgagactccggctctgagtggagaatcagtgtttgctgggactttgacctctttctgtaaaacagatccttaggagaactccatggcagagatgcctggagctgggagtatccctcaaagccagggcctgggatgggcattagcttgtgaaagcaggctgataaaagggttgactgtctgtctgggactgttgctttgtaagaaagtgggcctagtgagggcaagggagaaaaacatgactttttgaccaaaaacagcaaagtagcctgtctgctcaagtgactgaatctgtaatattagtgtatcagcacagaagatttgaaacactatgaagccctagatcttaattgaaggctctggaggaacaggtggagccaactgcacatcttctagataaagtagag[137 bp omitted]acagtgaaactccatctcttactaaaaatacaaaaatttagccgggcgtggtggcgcctgtagtcccagctacttgggaggctgaggcaggagaatggcatgaacccaggaggcggagcttgcagtgagccgagatcatgccactgcactccaacctgggtgacagagcgagactccatctcaaaaaaaaaaaaaaaagacaaaaccttaacttttcattcaaagacactaaaaaacttaagaaaggaatgacagatcacatttgagaagataatcactgaacatctagatttcagaccgggacggtggctcacacctgtaatcccagcactttgggaggtcgaggcgggtggattgcttgtgcccaggagtttgagaccagcctgggcaacatgacgaaaccctatctctacaaaaaattagcaggatattgtggtgcttgcctgtagtcccagctatccaaaaggctgaggtgggaggatcacataagcctggtggttgaagctgcagtgagccaagattgcaccactgcactccagcctgtgtgacacagtgagaccctgtctcaaaaaaaaaaaaaaaaaaaaaaattattcaaggttatgcctctacaagaagaaaagttaatccagaaggaaagtgtgggcatcaagaagcaaaaggtagtttctatagtgggaggagtggttgacttaaagtaatgtgaccataggaattaatttaacaggtcagtaagtttaaattatttattgactctaaacccttttttgtgatggaaggccaaaataattttttttttttttgagacagggtctcactctgcaatggcatgatcatggctcactgcagcctcaacctctggggcttgagtgatcctcctgcctcagcctcctgagtaactgggactacaggcatgctgcaccacacctggctaattttgttttattttttctttttggtagaaatggggttttgccatgttgctcaggctggtctcgaactcctggcctcaagcaatcctcctgctttggcctctcaaagtgctgggtttagaggtgtgagccactatccctggcctgaaatgatttttttttttttggagacaggttctcactctcacccaagctggcatgcagtggcacgatattggctcactgcaacctctgcctcctgggttcaagtgattatcctacctcagcctctcaagtagctggaattacaggcatgcacaaccacatctggctaatttttgtatttttagtagagacggggtctcaccatgttggccaagctggtcttgaactcctgacctcaaatgatccatctgacttggccttctaaagtgctgggattacaggtgtgaaccactatgcctggccccaaaataaaaatttatttatttttgtttttgtttttcccaaaataaaaatttaaatcaagacaaaaatgtaacgagtggcgttatttgtacatttttgcagatctctttaatgtttgtcttaatagaagtcagctagattctcatatatgcttctgtgttcagtatgttgcagtgttttctgggttgaagtacccaaagaaaatccaacctcacacagacaagtagttgggaaagggattattttaatcgctttttcacttgaaagcttaaatgttttctgttacaacaaatactgagttgtttttcttgaagtgacagggttacttcatttttgaggaaatgtctgccacatacccacatctgtagatccgtggttgtctatcagttcttgcaaataaaaatggtgctccctgagaaaagtagctagttcagcccaactcaaagaattgcacaaatgtctttccatgagacaactcttgtacttctgtgtgtggaagtgttttatgcatgcttcccatgttatcactcacagtttttaaaagatgtgtattcatgggtcaaggatttataaaattaacaatttttattctgtcatctggggcaatcttaagtgaaactggctttttctgtgagtgcatgatgaagaatacagtgactactgggacagtttgataacactgcctagattcatactaagacaccagctcttttacccatcatcagttttgtaccattaatgcaaatgtcaatcaattgagaacaatttgtagtattattataaaaatagctttaacctttcagacccttgaaagggccttggggaacatactctgagaagtgctgccctaaatagtaatagagaggatctgtccaatggtgtgctaagaatctcttcacattccccaggaagagagacatagctgcagacatttagagtagacataaagttaagtgtgttgctttaaaatcaagagtaactactaaaaaaaacccagacacatctatagttttcaaattagcacggctaaaaaaagggaatacagaaatcaattcaatagaagaaaggaagagactcagaaaaagggataacatcttgtgtgtgatggctcatgcctataatcccagctgaggtaggaggacctgggcaacacatagtgagaccctgtctctacaaaaaatataaaaaattaaccagatgtgctggtgtacacctaaagtcccagctgcttgggaggctgagatgggaggtttgcttgagcccaggagattgaagctgcagtgagctgcgattgtgccagtacattccagcctggatgacagagaccttgtctctttttaatgaaacaatgggcaaaagaagttcaagaaaggaaattagaaaccaatctcatgagtataaaaaaaaaaaaaaaggaagagaagtaaaattcttacaaatttggcagtgtactaaaataatgtatgaggctgggtgcagtgactcacacctgtaatcccagcactttgggaggccaaggcaggtgggtcttctgaggtctggagttcgatatcagcctggccaacatgagaaaaccccgtctctactaaaaatacaaaaaattggctgggcataatcccagctactcgggaggctgaagcaggacaatcgcttgaacccaggaggtggaggttgcagtgagccgagatcgtgccattgcacttcaacctgggcaataagagtgaaactgtcccaaaatacataaataataaaataatatacaatagacaaggaggatttattctggaatgcaataatttctttttttttttttagggacagagtcttgctctattgcccaggctggaatgcagtggcaaggcctttgcttactgcagtctcaacctcctgggctcaagctatcctcccactacctcagcctctccaggagctgggactacaggcacataccacccactaacaattatcacctggctaattattgaatttttgtataattttttgtagagacaaggtctcactttgttaaccaggctggtcttgaattcctggactaaagtgatcctcttgccttggcttctcaaagtgttgggattataggcatgaaccactgcacccagtccaagaatttaattctttgaaaatatttacacttttttgctcaaaattctcctatggcaaaaatacagagttctgccctgagggcctttgcacctctggttccttcagcctagcatggactttctttttttttcagagacagactctcattctgtcacccaggctggagtgcagtggtgtagtcacagctcattgcagccttgaactcctagactcaagtgatcctccttcctcaccctcccaaattgctgggattacacacatgaaccaccattcctgaccttgtactttgttttttttttttttggagtctcgctctgtcacccaggctggagtgcagtggtgcgatctcagctcacttgcaacctccacctcctgggttcaaacagttctcctgccttagcctcccaaatagctgggactacaggcgtgcaccaccacgtctggttaatttttgtatttttagtggagacaaggtttcactgtattggccaggctggtctccaactcgtgacctcaggtgatccacccacctcagcctcccaaagtgctgggattacaggagtgagccactgagcctggcctatctatctatctatctatctatctatctatctatctatctatctatttatttttgagatggagtctcactctgtcacccaggctggagtgcagtggtgtgatctcagctcactgtgatttccacctcctggattcaagcaattctcctccctcagcctcccaagtagctgggactacaggtgtgcactaccatgcctggttaatttttgtatttttagtagagacagggtttcactatg[137 bp omitted]agaagtatttatttttattttattttgagatagagtttcactcttgttgctcaggctggagtgcaatagcgtgatcttggctcacggcaacctctgcctcctgggttcaagtgattcttctgcctcagcctcctgagcagctggtattacaggtgcccaccacaacacccagctaattttttgtatttttagtagagatggggtttcaccatgttgactaggctggtcttgaactcctgacctcaggtaatccactggcctcagcctcccaaagtgctggaattataggcgtgagccaccacaccaggcctatttatttatttatttattttgagatggtgtctcaatcttttgcccaggctggagtgcagtggcatgatcttgtctcactacaacctctgcctcccaggttcaagcgattctcctgcctcagcctcctgagtagctgggactacaggcatgcacccccgtgcctggctaatttttgtgtttttagtagagactacgttggccaggctggcctcgaactcctgacctcatgatccacccaccttggcctccctaagtgttgggattacaggtgtgagtcaccgcgcccagtcaatatttatttatttatttacttacttacttaacatagagacaggatcttgctctgtcatccaggctagagtgcagtgatgccatcccatcatagctcactgcagcctcaaactcctgaactcaagtaatcctcctgcctcagcctccccagtagctgggactacaggcgtgtgccaccatgcctaagttttaaatttttttgtagagacgggggtctcaccttgttgcccaggctggtctcacactcctgggttcaaacaatccttccatctcagccttccaaagtgcctggattacagatgtgagccaccgcgcccggcctactcaaagtcctatctgggaaaatgctatctggtggtaatgtgtaattttcaatttttaaaaaaaattggttctgtaatagtcttttaggcccttcccctttgtataaagatgtatttataagtaaatgaattatgaaattggttcatttccatctttttaaaaggtagtcaaaaataattgtcagatgcaatgagatattggatgagctgcataggtaagatataagcagtgtacaaagtgggataaaaatgccactttacatactttttttttttttttgagacagagttttattcttattgcccaggatgaagtgcagtggcgcgatctcagctcactgcaacttccaccttccagtttcaagcaattcttctgccctagcctcttgagtagctgggattacaggcatgtgccaccatgcctggctaattttttttgtatttttattggagacggggtttcaccatgttggccaggctgtctggagctcctgacttcaggtgatctgccgacttcgacctcccaaaatactgggattataggcgtgagccaccacacccagtccacttttcatactttctaaaacaatatttagggatttttgtgttagccactctcctatctcatttctccaattgaagtaatgcataaatcttccattctcttttttctctcattcatggatagaatgaatgtctataatgaaaagagcttcttatcaatagccctctcagatttgttctgaattttgccaaatatttgtataactctgcaaaagactttctttccctgccttctcctttagagggaaaaacaaactgtaggtgtgacagcttacctcctagcattgttgtgaggtttggctggcacaagataaagtgctgtgtaattactctgaaatgtttgtaattaataaagaaatgaattgtaggcactttgtcagtagaaaccactgtgatttggaaacgcaatgtttcaataataaagactataaaatttaaaaaagaaaaaaattaattctctccaaattataaattaaatggtatacctaatgactttccttagaacttgaaaagcttaacccaaaatttatatgaaaaggcaagagcctggaatggttaagacaacgttaaagaagaagaagaatgtgagacttacccttatagagaccgcaattaaccataaagccatagatgttctcaagcctagtatagcgcctgacacacagtagttaatgaatgtttgctcagtagactgatgggtggaacaatgagttgcttgggggtcaggattaactctggaagtggtagttgtgggaagggttgaacctgaagattagggcgactcagaactgcaaagaccagggaagttgggttctgagaaggggcaggacagagagctgactaatttgtttcatttgtctacacatacccttaagcaaattttatcttgtacagtttgagtatggggtttatgttttcttaaaattcagcaagcctttaacaggaatgtactcagtattaagtgtggtgtcagattggctgcagtgtaggaaagcttttattccatgggaaagaagtccatgatttttggagctatctattatgcagttatgttgctatagatttagttatttggatctcatgattgaaatagtattttaaattggggacatcttttgtttgggagaggttgtttagaaatgacaggtgaagaataaaattattagagtaaaatttggccatatgtgacatgggcattaatgatccaatgatttatatatgccagtaatagaatttacaaaggacagccaatggtgagatgctgttctctggtggcattctggtaataaccagctctcgtatggtgcttgatagtttccaaagtacttttgcataccttatgttatttgtgcctccaaggtatgtaaaggaggtttatttcaattcagtgatcgtttattgagcatgttttgtgccaagttttgtactagatcttgggaaaccagcaatgaggcaaagaacttgactccaagttaacatagacaggtaacactgggatacacgcacaaccaggagtttaagtttggaaacaataattaaggagggagacatatgattaggatgtggtaatggtaggttgtgatggctttcctaggctttgttatattttttgtttcaaggaagaattgtgtgttttacaccactttgaaactatctttcacaatttacatagctgataatatacttttttttttttaaagcagtctagctctgttgcccaggccgcagtgcagtggcaccatctcagctcactgcaatctctgcctgccgggctcaagcgattctcctgcctcagcctcccaagtagctgggactataggcgcgtgctaccatgcctggctaatttttgtatttctagtagagacgagtttcaccatgttggccaggctgatctcaaactccctacctcaagtgatctgctgctttggcctcccaaagtgctgggattacaggcatgagccactgcgcccaaacatctgatgatatactttgttgttgttgttgttgagacaacgtcttgctctgtcgcccaggttggagtggtgtgatttcagctcactgcaacctccactttccgggttcaaatgattttcctgccttagccttctgagtagctgggactacagacacgtaccaccacacctggctaaatttttgtagttttagtagagatggggtctcaccatgttggccaggctggtctcgaactcctgacctcaggtgatccatcctcctcggcctcccaatgtgctgggattacaggcatgagccaccacgccctgatgatatacttttgaaaattatattacattttctacagttacactgtctttcctctgaaaaatctgggtgatctgttagaacatttgatctaagctacactccttgataatgtatttgtcgaaggaatgattaatttatgtgcataatttagtcctttgcatacaaaatgcaattttgtttattagaaatattttagataatgctttgtaggatttttgtgttatttttaggtctgaaaaagatgaagaataaaacatggcaagtctagagggaggcactgcttgaagtgcgtgaaacaaatcaagcatcaacaaaaatagaagcccttgagatgaagaacagaaaatctgtgattattatcattattagctttacagggatgttgaagtgatcaggatatcaatgacataattaagtggtattatatttttaaaatttgagaaataaggaaaccattgctttaggatatgtctcttatgtactcagaaaagcttgcttttgtaagttaagcctcaatgatgaataaatagtgcatttgtggctgggcgtggtagctcatgcctgcaatcccagcactttgggaggttgaggcagacagatcacctgaggtcaggagtttgagacaaggctggccaacatggtgaaaccctgtttctactagaaatacaaaaaataagccagacatggtggtgcacacctgtagtcccagctactcgggaagctgaggcaggagaatcacttgaacccaggaggcagaggttgcagtgagtcgagattgcaccactgcactccagcctgggcgacagagtgagactccatctaaaaaaaaaaaaatagtgcatttgtattaattacatggatacaattctgtataccaaagaaaaatatccacatttactgcagattcttttgtaggctgtgtagaatttcttactttaggccgggtgtggtagctcacacctgtaatcccagcactttgggaggccaaggcaggcggatcagaaggtcaggagattgagaccaccttggccaacatggtgaaaccctgtctctactaaaatacaaaaaattagccgggcatggtggcgtgtgcctgtaataccagctacttgggaggctgaggcagggaactcacttgaacccgggaggcggaacttgcagtgagctgagatcgcgccactgcactccagcctggcgacagagcaagattccgtctcaaaaaaaaaaaaaaaaaaaagaatttcttactcatatgaacttgaccctgtaaacactataagaaaaacttctttgctacaggttgattttcttttggaatgggatccctttattctgataattgattctaacagaagacttctactcaatgtgataatggaatgatttggagcaactctactatcaaatcagggaaagctagcctccagggtgatccagaggttctgctgtcaccttacaaacccaagacaagatttttcaccaggactgggctttggataacatatacgttccataacaatacctcgaaggaggcatgtgtttacatggcctagtgattttctctggttgcttttgtggaattcagatgctgattttatcagtgactaaccatgacatgtggggacattgtaagataattggtaagttttggaaaatctcacagtggctgggtaattcgatttcctttttgtgcaggatttggggatgagaatggcattcttttcttcttcttctaaaagctggaatcttgctatgttgccctggctggactcgaactcctgtgctcaagcagtcttcctgccttggcctctgagtagctagaactataggagcataccactgctcctggtgaaagtggccaggagttgaaataacagaaattttgttggcagagtgatttgtgctgtctctagcagaataacactgagcgagtaacttgacctctctgaatttcagtttctttatttgtgaaaagaaactaatattggccaggtgcagtggctcacacctgtaatcccagcactttgggaggccaaggcaggaggatcccttcagcccagaagttcaagattggcctgggcaacatagctagatcccatctctaaaaaaagtaaaaaataagtcaagcatggtggtgtgtgctcgtggtcccagctacttgggaggctgaggtgggagaattgcttgagcctgggaggttgtggctgcagtgagccatgattttgccactgcacacagcctgggcaacagagcgagaccctgtctcagaaaaaaagcccacaaactgatattactttatagggtcttgtgaaaataaagcattagcatggtgcctagcatacaataaatataattattctattatcaataatataaacatggagggcgattattagctcatttgctcctcaaaggtatgtaactcaataaagatgcattctcttctaatattaagtttccattgttaatacagaaatcgtccaggtgtggtggttcatgccagtaatctcagcacttgggaggctgaagtaggtagagagagcagttcaattttcttttctccctgcaggtgctgctgtcaagcttgaatgaaaggtatctcatgggtgggcgcgtggctcatgcctgcaatcccagcacttcgggaggccaagacaggcagatcgcttgagctcaagagtttgagaccagcctggacaaaaccccatccctgtaaaaaatacaaaaattagctgggtgtggtggcgcacgcttatagtcccagctactcaggaggctgaagtgggaggatcgcttgagcctgggaggcaaaggcttgcagtgagcccagattgcaccactgcactctagcctgggtgacagagtgagaccatgtctcaaaaaaaaaaaaaaaaaaaaccagacacatttcgatagaaacattactgcataaggtattaaaattatgtgttaacatttgatcaccaaaggaaatataagcattattgcattctatcttttagtattgttaaatttctttatttagtcgatgttgtattaaagttaaataaatgcatccttgtttctattgctttttgtttttatactagaagttgttattcaggaagaatagagaccaggctatatttgtaagtgttgtgaaagaaatcttataaaagataaactaagattaggcagtattaggtagatgcaaaagcatcagaatgcataagatgagtaggatacaaagtgtagttgaaaagccttggctgggcacagtggctcatgcctgtagtcccagcactttgggaggccaaggtgggaggatccctagagtccaggagtttgagactggcccaggcaacatagtgagacccccatctcttgaaaaaaagaaaaagaaaaaaaaaaaggaaagccttatgtctcagagctaagtgtctgtttttaaacaaatgtagccttagatgtcctgaaaaaatctgtcaaggtaaatttggtttggggtagaggtcagggagcacttgcagatgggatagagagaatttggaaaacgagcagggttccaaagtactgagcaattttcaggaggagtataaaagcctaggggataattcctatgcatctgcatagggaatttatttgatagctatattttcaggacctgttgacattttattcatccttaaaggcctctttcagttgccatttcccctgaagtcttctcagtttttctactagctaa[141 bp omitted]gcctcagcctcctgagtagctaggattacaggtgcgtgccaccatacctggctaatttttgtattttttagtagagatggggtttcaccatcttggccaggctggtcttgaactcctgacctcaggtgatctgcccacctaggcctcccaaagtgcggggattacagggatgagccaccacgcctagccaagaaccattttctcttcagacaaaaggaactgttgtttggggtagcattttatttatacttataaaatgttatgttacagtttgtgttgttacatgaatgtatttgtctcttaaatcatggtatagtgtgaagaaaatgagttctcaggctggaaatatctgtatttgagtactagctctgacctttccaacaatgtgtctttttgtcatataatgtttattttcatagggttgttgggaggattaaatgaaattatatctgtaaagtaccttttataatctgctaatctgcaggtcataatctaatggtatagaatttttgttctgtactctttgataagaattctaaggaggtggtttggaaagagaaatttacagataccagatgaaatccaaaacccaggtatataaggagtcatatgcaagatctctgtctgttaatctgcctcatgaaaatgacgaaccaggagaatctatgggacagtaggaaaagctgccagtcactcagatgataataacatttaccttatacatttataatggaaatcctgccactgtttacaccagaaacagtttctttttttttttttaattttattattattatacttaaagttttagggtacatgtgcacaacgtgcaggtttgttacatacgtatacatgtgccatgttggtgtgctgcacccattaagtcatcatttatcattaggtatatctcctaatgctatccctcccccctccccccgccccacaacagtccccgatgtgtgatgttcccccgcttcctgtgtccatgtgttctcattgttcaattcccacctatgagtgagaacatgcggtgttttgttttttgtccttgtgatagtttgctgagaatgatggtttccagtttcatccatgtccctataaaggacatgaactcatcattttttatggctgcatagtattccatggtgtatatgtgccacattttcttaatccagtctacaccagaaacagtttctattgagaaaatggattttaatagaaaattctcatttaaaatttgggcagatatctgtattgttgagttaaccaaatgagaagagaaaaatccttacaacgtagcttgtcatttgcctgacttgatgcagactgctttgcttagtaatcatgcagcactatcaagactgtgtacataatgtcaggatccatctacataagatgtagtatggactgatgccaagtgagcctggggtggaaatcagaactggatgcaaatcctgatgttatccgagaacaggcacctgttacataggctgtgttactgtggcaaaggtaatggtaaaacacagactggccagaagcattgtgtacaatgagaccttgcaactttgtgtatattagtatgtggggggatgtgaattattaaagacatttaaaactgactgaatcagcaacctctaatctataaaaaaaaattccagacgtccagccgggcacgttctcgtgcctataatcttagtgctttgggaagctgaggcaggaggatcacttgaggccaggagtttgagaccagcttgggcaacatagtgagacccctgtctctacaataaaagtaaacaacttagctgggcataatggcatgtgcctgtagtcccagctactcaagaggtggagatgggaggatcacttgagcccaggagtttgaggctgcagtcagccgtgactgcaccaccatactccagcctgggtgacagagcgagatcttgtcttaaaacaaaacaaaacaaaacccagacttcctataattcctaaaaataaatgtgggtttgagaggcctaccttgaaatgtacaagatcctggccagacttcacctatctaacaatatgctagtaactatttgttgacatgtcttaaagaaatgttcatcagggcctcagaaagcaaggcagagaacaggtccctgaaatttactagcttgcaccaaaccatcagataaagataggttaatatttgacagaaaaaactcttcaaaaagagacagtgaaatactcttgagatgaatccaggtattaaaaagttcaggaaaaaaaattgtctctggaaaaaaaaagaatcaaggagagaccaggtgcggtggctcatacctgtaatcccagcactttgggaggccaaagcaggaaggtcacttgagcccaggagtttgagaccagccttgggcaacatagtgagaccccatctctaaaattatgtaaataaaaatataaaaataaaaaagagaaagcaaataaccccaaaataacttttatttttgttttttattttattatttttattttttttgatactgagtctcactctgtcgcccaggttggagtgcagtggcacgatctcagctcactgcaacctctgcctcccgagttcaagtgattctcctgcctcagcctcccaagtagctgggattacacatacaggtacgtgccaccatgcccggctaatttttatatttttagtagagacagggtttcaccatgttggcaaggctggtctcgaactcctgacttcaactgatctgcccaccttggcctccgtaagtgctaggattacaggcgtgagccaccgtgcccagccaacttttattttaataatagagatgcaatctcactgtgttgcccaggttggtcttgaacttctgagttcaagggatcctcccacctcagcctcccaaagtgcaaggattacaggcataagccactgtgcctggccaaaataactattttaatattaagttaaaaatagtacggaccaggcacagtggctcatgcctgtaatcccagcactatgagaggttgaggtgggctgatcacgaggtcaggagtttgagaccagcctggccaacatggtgaaaccccatctctactaaaaatatttaaaaaaaaaaaattagccgggcgtggtggtaggcacctgtaatcccagctactggggaggttgaggcaggagaatcacttgaacttgggaggcagaggttgcagtgagccgagattgctcactgcacttcacttcactcactgcactgcacttcagcctgggtgataagagcgaaactccgtctcaaaaaaaaaaaaaaaaaagtaaaaggctgggcacggtggttcacacctgtaatcccagcactttgggaggctgaggcaggtggatcacctgagttcaggagtttgagaccagcttggccaacgtggtgaaaccccgtctctactaaaaatataaaaattagccaggcatggtatcacttgcctgtaatcccagctacgcaggaggctgaggcaggagaatcacttgaacccaggaggcagaggttgcagttagccaagactgcaccactgcactccagcttgggcgacagagcaagactctgtcttaaaaaaaaaaaatagtacagtagggaaattatagttaacaataatttattgtatagcctaggcaacatagcaagaccctgtctctacaaaaaacaatttttttaattagctgcgtgtgctggtgcacacctgtagagaggctgagacaggaggatcacttgggcccaggagtttgaggttacagtgagctataactgtattatgccactgcactccagcctgggtgacagagcaagaccctgtctctaaaaaaacaaaataaaaaataatttatggtatatttcagaatagctagaaaagaattgtaatgtttctagcacaatgtttgtggtaatggatatcccaattaccctgatttgatcattatacattgcatacaggtgtcaaaatatcacatgtaccccaaaaatatgtacaactatgatgtatcaatttaaaaaaggaaaacattccaaacatctctccctctatgtgtatatacagataggaagacggatggagagatgaatgaacaataaaatatataaaggaaatcatacatgatacattttagggacagttttataagtatttgatgtatttgaagatcagctgttagctctcatcgacactgactgtcagtagatttttgaaggtagtaacagatacataggtaaccaaagtatagagagcttgtttagtgaatcttcatccttattatgttttctagatgaccacacaggtatacactatgggatagtccttatcttttggcccagacagctatgttgaacttggtatcaatgtgcacatctggagtccccatctccttcatggtgaatttctggatctctaagtgcctcctgaggagcttgctttgcttttttttttttttttttttttttttttgagatggagtctcactctattgcccaggctggagtgcagtagtgtgatgtcggctcactgcaacctccacttcctgggttcaagtgagtcttctgcctcagccttccaagtagctgggactacaggtgcacaccactgtgcctagctaaaatttttaaaattttttttagagatggagtttcactatgttggccaggctggtctccaactcctgacctcgtgatctgccctccttggcctcccaaagtgctgagattacaggtgtgagccaccgcgttcagccccagggcttgctttttgaagcccactccacggaggcacctgtgaatactgatggtgtattctcgggttaccacctggtagatgcagaatggcctgttctttttgccacccttttcaggaaccattctgccaggcccaaattggaaagcttacatgataatttttaacaaaaataatattttattggtggtcatctgagtacattttgcagttttcctccttttctccaaactctagaaatgacaggaagaaagaatttaatgtattcatagaagcatttgaaaacaagacgaattctcttatgagaaattctctactaaaattagatgggagtgaattgaagagggtaatggcagtccagtgtatatgtgggaactcaactcatagtactacctcaagaagtgggagctctattctcacattgccggtagtggaaactggaagcaagatgaagactcattatgggagctggtacagtgcagacccattctccctgtacccaccctggcctcccatctgtaagtcatgcatctgcaacaactatctccagacaggagcagcgtctcagaggtagagcaatgcctcaagtggctgacaataccagggagaaataaggagcgcttaagcctggaaaactagctgtggaggcgtcttttcttgtatcatactctacacatcttccagtcttactgaaaaacacatggagtgtaagttccaacaatcaaatctgtacctccttcaactacaccctaactccaaggccagttactttctcaagtcaagaaagtttcattctaataggaatctcagtggaaaaaactgcacttatggtaaagaattttcacatacttgagtactctttgaaacagagtttaaagaaaacatcttcacttgaggaaacagctaacagaattggaacagacctttagaaatagcataatactgtcagctgggtgcagtgggtcacgcctgtaatcccagcactttgggaagccgaggcagatggatcacctgaggttaggagttcatgaccagcctggccaacatggtgaaaccccttctctactaaaattacaaaaaaaaaaaaaaaaaaaatttagccgggcgtggtggtgggcacctgtaatcccagctactcaggaggctgaggcaggagaatcgcttgaacctgggaggcagaggttgcagtgagccgagttcacaccattgcactccagcccgggcaacaagagtgaaactccacctcaaaaaagagaagaaaagaaaaagcataatactgtcaaagagatgcacagatattgtatccatgaagcaagaatgggcgttataaaaaaaaggaaccaaattggagatcttgaaaatgaaaaatgtaatttttaaaataaaataataaatgctgattacaaagtggatacactgaagagtgaattagtgagctagatgtttggacagggaaattctcccagaatgcagtaggaaaggaaaggagaaggatggacatacgaaggaaaatttaggagacatggagggaagatccagaaatgctaacatcagtctaataggagtgctagacattgcagaaaaaggaggggagatatggacagtgttccttgttacttctgcaactgtcattctgtaacccctcttccttgctggccatcctgtctcccgctatagaggctgaaaatgtacacaaattgcttttccagccacctttgtagctgctgcatggatggataacccagtcccaatcaatgggatctgacaggaattctgctaggcaatttctgtgaaaggtacttctccacaataccaagaggagcataaggaaaaactgctttcctgtgttcggatgtgctatctggagctgcagtggccatcctgcaacctgaagggaacaaaagcc[131 bp omitted]gcacagtcttggctcactgcaacctctgccgcccgggatcaagagaatctcctgcctcagccttctgagtaactgggattacaggcttctgctggcacgcccagctaatttgtgtatttttagtagagacagggtttcaccata[133 bp omitted]catgttggccaggctggtctcgaactcttgacctcaagtgatccgcttgcctcggcctcctaaagtgttgggattacaggtgtgagccacggcacctggccctcatatactttagatatttgacaatgcaaataccttcttcgattctcctgttacctagcaaatttgtatatgtgatgtctttcatgggtagaaataattttgatgtaatcaaatttttatttgtttttctgtatggtttgtactttagaagttttaaaaatttcttccttgtctctaaatcagaaagttcatcctacattttattcagttaactttatagtttttctttcacatttcactccttacttcatctggaattcacctttatatatgttaggtcgcattctagttttattttcctccatatagtgaatcagtttttccagcatcacctaataaatgatctcttctttccccattgatttgtgatgctttctttattttacatcaagttcccatatagaaatgagtccttctctgaattctctactttgttccgttggcatgtcgcaccgatgccttatcattatggccttgcagtatgtcttaatatttgatagagcaagcctccctttctccatttacactaaaacaaaattttaagttacttttaatttttttgtagagatgtggtctcactatgttgcccaggctggtcttgaactcctgggttcaagtgatcctcctgccttggtctcccaaagtactgggattagaagtgtgagccaccacacctagccttacccttgtttttaaagattatctaatccaccaatgaacctttctccttcgtatacattgtagaatattttattgttttattttatttatttgtttgttttttgagataggatctcactctgttgcccaggctagagtgcagtggtgctattatggctcactgcagcctcaacctcccaggctcaagtgatcctctcacttcagcttcctgaatgtctggcactataggcatgcaccaccacacctggataatttttgtattttttgtagagatgggtttttgccatgttgcccaggctgttcgcaaactcttgggctcaagtgatcctcctgccttggcctcccaaagtgttgggattgcaggtgtgaatcactgcgcctgcccatgaggtatctttaattcaagcctgatagcagcagctgcagggaggcaagaaaattgaactgctgtctctacccagaaatttgatatagtatttatactttggagggaaaatgaaaggaaatgcatatgtaaggtaattgagaccatttataacttaaatgatgaataacagacatatgttatcaatcaactgatgctttttttttttttttttttgagacatggcctcgctctgtcacccaggctgaagtgcaatggtgtgatctcagctcactgcagcctcgacctcccaggctcaagttattctcccatctcaacttttcaagtagctaggatcacaggcactccaccacacccagctaatttttttatttttggtagagacagggtttcgcaggtttgcccaggctggtcttgaacttctgggctcaagcgatccacctgcctcagcctcccaaagtgctgggattacagacataagccaccatgcctggcattttatgcaattctttaaaatatgttttatgagctttggatagtgagcacagtccccagtcggtagttttttagcctttgtcctcatccttctccctccccctgtaggagtccccagtgtttattgttccatctttatgtccatgtgttcccaatgtttagcacccacttataagtgagaacatgtggcatttgtggcatttggttttttgttcgtgtgttaattaccttaggataatggcctccagctgtatccatgttgctgcaaaggacaggatttttttttttttttttttttttttttttttttttttttgagagacagagtctcactctgtcgcccaggcggtggctcaatcttggctcactgcaacctccacctcctggattcatgcgattctcccgcctcagcttcccaagtggctgggactacaggtttgcaccactacgcccagctaatactttgtatttttttggtagagacggggtttcactgtatgttggccaggctggtctcgaactcctgacctcaggtgatccgcctgcctcagcctcccaaagtagctgggattacaggtgtgagccaccatgcccaaccaatttcattctttttttatggctgtatagtattccatggtaaaaacagtaatttttaaaaaggctcagcttggattaattacacacatataccaaagttcagctatatgatgtttataaaagacacgtgtaaaacaacatagaaaacctaaatattaagaaatgaaaaatgataacatcagacaaatagtaaccaaaggacattgggagtagcaattgaataccagacaaaataggatgtgaaaaaaaattaagggagcattttattttgataaaaggaagaatctacctaaaataaattagcaatcatagaaatagtctcacactattagtattaaggaaacataaaacaacaagatactattgcactttttttttttttttagctactttgttaactgaaactattgccctttagattgcccaaaatgtcaagtacgggcaaagatgtggagaaaatgataagctctcacaactcttgagatagggatagggtatattgatatagagtcatttggaagagcaatttggcagtatctaataaaatgaaaatgaatgcctgggtgcagtggcttacgcttgtaatcccagcactttgggaggccgaggcaggcagatcacttgaggtcaggagtttgaaaccagcctggccaacatggtgaaatattgtctctactaaaaacacaaaaattagccaggtgtggtggcatgtgcctgaaatcccagctactcaggaggctgaggcaggagaatcgcttgaacccaggaggcagaggttgcagtgagctgagatcgcaccactgcactccaacctgggtgacagagcgagactctgtctcaaaaaataaaaaagaaaacaaatgtgtttttataattaaatgcttatatttctgggtatactgagaaacttttagatgcatacaagaatgatcatggtagcattgtttggaagtgcaaaaaatcaaagagtaataatctcagtgtccgttaatagaatggataaataaatgcggactaatcatacagtggtatatacacagttaatagggatgaattaactctatatgcagttcactcaacaatacagaatgaaaaaaagcaagatgcagtacaatatatttggtatggtaccattgtgtaaagaaaaaagcattattcacacatagcaatattatatatcattgctgataataaatatctatctgtctatatatctctaaataccaaaaaagctagatggaaaaggttttgctctgcattggagggatgggagtgggaatggtgtttaaagggaatattagctttctttataatattttgttttttaaaaaaatcaaatttggctgagcataatggctcatgcctgaaatctcagcactttgggaggctgaggcaggcggatcacttgaggtcaggaatttgagaccaacctggccaacacggtgaaacaccatctggcatgcgcctctagtcccagctacttgggaggctgaggtaggggaatcgctggaaccagggaggtggaggttgcagtgagccgagatcatgccactgcactccagcctgggtgacagagcaagactctctctcaaaaaaaaaaaaaaaatgacatttataattg[132 bp omitted]ttgaactcctgggctcaagtaatcgtcccaccttgacctctcaagtagttgggactacaggcatagccaccatgcctggctaatttttttaaaaattttcctttttttaaaattttttttaaaaattttttattttttgtagaaatggaatcttgctatgttgctcaggttggtcttgaactcttggcctccccaaatgctgggattacaggtgacagccactttgccccacctaattccaactacttctttccctttaatgttttttcttggaaattgacaactaaaaaaaaaaaaaaggaaattaaagtaaaatggaagaaatggttaaacattagtaaatatttttcatctaagagctattatttctcagtctatctcttcaaagttaagaaaaaagatatgaaaatcactaagtagtagaatcattatatgttttagctacatgttttattattggacacttttgttaacatcttactatggaaagatgaagaaattgaagttaacactcagcttcctatcttctctcctcatcccattgcttttggtagttatattatctgttgaggtttatagcatttacattaggtcctgtgtagtcttagttctatattcaggtggaatcactgctcaccaccagaagtactttcccattactgatttatttgtattgattaattattaaattagattttgtttctttctttttttttttttttttttagaaaagctctttgtcttaaattccttggatttttttcatgttgagactatctctttttcttatatttgaacaacatcttgactgggtatcattttcttgggccacattttgtctctgaaatttgtggcatgtttcatgtttttctggcattgaaccttgcctcagagaggtctgagataagtccaattcccaactctgcttcaccccttttaggcaacttgctttattgtctggttggttgtgttcaaggaattctttctttaactttaatgtttagtgacttaactgggatagagatcagtagctaccatgctgtgtcagtttttttttttttcttggaacatggtgtgttatttccatctgtaactaatttccttatttattaaagagaaatttgaaagattatttctttgaataattttctcattttcctgttttattcataaagtcctttacttcagggacattagttaactttataacagatgccatgttcttcatacctattgtcttctctcttattcctttgttttcatcgtctcctttctcagctttcatcatcttttatctttttctttcttttttttttttttgggacggagtcttgctctgttaccaggctggagtgcagtggtgcgatctcggctcactgcaacctccgcctcctgggttcaagtgattctcctgcctcagcctccccgagtagctgggactacaggcgcatgccaccacgcccggctaatttattgtatttttagtagagatgggggtttcaccatattagccaggatggcctcaatctcctgacctcgtgatccgtccaccttggcctcccaaagtgctgggattacaggcatgagccaccgtgcccagccctcatcatctttatttttaacctttgtgatatgttcatgtgtttccttaagttgtcttatttattagttttttaatgatgctgttttgatcctgtctgtttccttgtctcttcagtcttcctcttcatctcaagttgtcttatcgtattgt[132 bp omitted]tgaaactccatctctactaaaaagacaaaaattagctgggcgtggcagtgggcacctgtaatcccagctactcgggaggctgaggcaggagaataacttgaaccctggaggcagatgttgcagtgagctgagatcatgccattgcactccagcctgggtgacagagcgagactccatctcaaaaaaaaaaaaagaaagataatcgattctattattagactgttgtataaaacaaatcgtttgtggtaatttcctttcatttcttgagttatgctatcttccagaacgaggttagttattgaaggtttggaaaggtctttattttccctcatgcctgactggtagaggatcaaattctaagctgaaaacagagttttatttatttttatttatttatttttttgagacagggtctcactctgtagatcctgtacagaggctgtagtgtagtggcacagtcacggctcactgcagccttgacctcctgggctcaagtgatcctcccacctcactctcctgagtagctgggactacaggcgcaagccaccattcccagctaatttttgtattttttgtagagacaggttttcgccatgttgcctaggttggtctaggactgctgggctcaagcgatctgcttgccttggcctcctaaagtgctgagactgcaggcatgagccgctgcacccggccactgaaaacaatagtttaatttttattatatttatagatatttttcagcaaccatactttttatttccaagatctctttcttgttctctgcttgttccttttctatagcagactatattttgttaaactgattaaatatattcctaaaaactttctgagtatactttctgaaatttggaatttcaaaatagttcctttccattaaattctgtttgtttactttggttctgctctgtttgctttgctgtttcatcaaatgtctgggagttcttggctgtccattcctatttaagaatataggcatgtagtatggaccatctatactgtcttgtaggtaatctgtttctctagtataggctcactccaggatgggtaagctggcttaggtttctttctacaagggtggtatatgtcaagtggtaggcacagaatgcacagagaaggagcagtctgggaggttaggtcctctgaaattccaagatgagacaggttcccactgttagggccagcactcactctagaagacctactgtatccaggcagatcattattttctgagacagagtcttgctctgttgcccaggctggagtgcaatggcacaatctcggctcactaaaacctccaccgcctgggttcaagcaattctcctgtctcagcctcctgagtagctgggactacaggcgcatgccacaaagcccagctaatttttgtatttttaatagagatggggtttcaccatattggtcaggctggtttcgaactcctgacctcaggtgatccacctgcctcggcctcccaaagtgttgggattacagacttgagccaccgccctcagccagatcattctttttaatctttgcttatctgatgtgcaaaacagtcagaagcttttatgattaagaaagaataaaattaaatggactaaccatttttgagaaactaaaaaatgaacaacaaaataaatgaaaggaaaataaaaataagtaaaggct[141 bp omitted]tggtggcgggtgcctgtagtcccagctactcgggaggctgaggcaggataatggcgtgaacccaggaaaaaaaaaaagagaaagaagtgaagatcagctgggtgtggtggctcgtgcttccactttgggaggctgaggtgagaggattgcttgagctcaggactttgaggccagcttgggcaacactgggagaaacagcctctataacaaaaaataaatcaaaaaaattagctgagtgtgatggtgcatacctgcagtcacagctacttgggaggctgaggtgggaggatcgcttgagcctgggagttggaagttgcagtgagccaagaacgcaccaccacacactgcattccagcttgtgtgacagaccaggaccctgtcttggaaaaaaaaaaacaacagtaaagattaaagcagaaattagtgaataaaacccagaaaacaatcaaattaatgacaaatctaagaacttgtcttttaaaatagcattgaaatagaaaaatctctattaagataaatataaagaagcaaattaaatacaaagaagcattaaatatattgcattagtaatgagacaaatgaatgtgatcagatttcatggaggtttaaaacattcaagataatcttttaaatttaattttttaa[150 bp omitted]tctactaaaaatacagaattagctgggtgtgatggcacacacctgtagtcccagctactcaggaggctgagacaggagaatcgcttgagcttgggaggtggggattgcagtgagccgagatcatgccactgcactacagcctgggtgacgagtgagactctgtcataaaataaaataaaataataaaataaaataaaataaaataaaaaatataaggttttgctgtgtttcccaggctggtcttgaactcctgggctcaagagatgctcccacttaggcctcctaaagtgctgggattacaggtgtgagccaccatgcccagcctcaagagaatcttgtgctaataattctgaaactcataatgaaataaatattttaggaaggtgtatattaccaaaatttagtcaagaagtaggaaaagtaactggacgcagtggcttatgcctgtaatccagcactttgggaggctgaggcaggagaatcacttgaggctaggagtttgagaccagcctgggcaacatagtgagatccacatctaaaaaaaaaaaaaaaaaaaaaaaagaagaagaagaagaagaagaagaagtaaaaaaggtgataggcgggatgcagtggcttattcctataatcccagcactttggtttgggaggctgaggtgggcagatcatgagatcaggagttcgagaccagcctggccaacatgatgaaaacctgtctctactaaaaatacaaaaattagctgagcgtggtggtacgcgcctgtaatcccagctgctcaggaggctgaggcaggagaatcgcttgaacctgggaggtggaggttgcagtgagcaaagatcgcgccactgcactccagcctgggcaacaagagcaaaactccatctcaaaaaataaataaataaataaataaataaataaataaataaatgtgataaaagttggtagaaaagtgagaaattatcctaagactctccctactccaactagaattgggctggttctatagagttttatgggcaagctctaattgtgatactttacttcctatctgaatattgccacacctctaacaaaacatccatagtatttacttctttctattcagttctctggtaaattagataagaaaaggcagatgttgtaaacttgtactatctatctacctactcaacagatgctaataggtgtcaagccttgccccaagagctggtaacaaagatgaacgaaagatccacaacttaaaaatattaagatatatttatatcatttatatcaaagatatatttataccatttcatttgggggcagcaagttcctcttttattattatatccctgctggtgagaaataaccccatttgtatcttatggtgaatatgatctctgattatgttaaatacttagaaggcccggcatgacggctcatgcctgtaattccagaactttgggaggccagggcgggcagataacctgaggtcaggagttcaaaaccacctggccaacatggcgaaaatccatctctacaaaaaatatgaaaattagccaggcgtagtggcacatgcctataatcccagctactcgtgaagctgaggcaggagaatcccttgaacccgggaggcagaggatgcagtgagctgagatcatgccacttgcactccagcctgggtgatagagcgagacttcatctaaaaaaaaaataaaaaattgtgcacctgtagtcccagctactcaggaggctgaggcaggagaatcgcttgaacccgggaggcagaagttgcagtgagctgagatcgcgccactgcactccagcctgagcaatggagcaagactccatctccaaaaaaataaataaatgaataaataaaaataacataaaaaataaataaaaattaagaaaccacaacaaatactcagagatagaggatgttggtgggcttaagaggaggaaaaatctagtactaggaatgttgtggaagtggtggctattttttgattttttatttttatttacatatactttttgagacagaatatctctctgttgcccaggctggtgtgcaatggcacgatctcgactcaccgcaacctctgcctcccaggttcaagcgattctcctgtctcagcctcccgagtagctgggttacaggtgcctgagtggtggctgttttaaaggaattggtttcaagtttttacaattgtgaactccatcaataaaaacgggggggtatatatcccccattatatgtatatctgtttattcataaataatattaatgtatcatatttaatttatataaattaaattataagtaatactccatgtgttaaattaattatatattaattataaaacgaataaaatacattttaaagttaaagatgaaaaataatattttaaaatcaatttttttttctttattttagagatgggttctcactatgttggctagatttgtcttgaactgctgacctcaagcaatcctcctgcctcagcctcccaaagttctaggattacaggtgcgagccaccatgcccggctaattttggtattcttagtagagacaaggttttgccatgttggccagactggtctcgaactcctgatctcaggtgatctgccctccttggcctcacaaagcgctgggattacaagcgtgagccaccacacctggcccataattgtctttctaattgagtagaatataggggccaaggacttcacattgtttctgtattcccagtacctagattagtacctggaaaatagtaggggctcaataaatatctgataaatgaatgaatattaagaatgataggctgggcatggtggctcacgcttgtaattccagcactttgggaggctgagttgggtggattaccctcaggagttcaagaccagcatggccaacatggtgaaaccccatctgtactaaaaatacaaaaattagccaggtgtggtggtctgtgcctgtactctcagatactcgggaggctgaggcgggagaattgcttgaacttgggaggtagaggttggagtgagccaagatcatgcgactgcactgcagcctaggtgacaagagtgagactttgtctcagaaaaaaaaaaaaaaggaaggaaggaagaaagaaagaaagaaagattggctgataccaggcaggaggatctctcaagcccaggagttcaagaccagcctgggcaacatagtgagactttaaaaacaaaagaatgataggttgggcatggtggctcacacctataatcccagagcttcgggaggccaagctggaaggatcactcgaggccaggagtagttcaagaccagtctgg[132 bp omitted]aaaccccgtctctactaagaatacaaaaattagccaggggtggtggcatgtgactgtaatcccagctactcgggaggctgaggcaggagaatcgcttgaacccagcaggcagaggttgcagtgagctgagatcgtgccactgcactccagcctgggtgacagagcaagactttgtctcaaaaaaaaaaaaaagaaaagaaaagataaaggaaaaaaaggaatcatagttaaaaagcaaagaaaaaaagtgtaagatcagagcagtaagcatgagtgtatatttcagcagccctggttggaggagggatggtgatatggtttggctttgtgtccctgtccaaatctaaggtctaattgtaatcccccgtgttggaggaggggcctgatgggaggtgattggatcatggggcagcttctaatggtttagcaccatccctctagggctgcttgtttaaatgcatgtagcacctctcccactcacctctctgttgctggtcatgtgaatatgtgcttgcttcccctttgctttctgctatgattgcaagtttcctgaggcctccccagaagcaaaagcttgtacagcccacagaacgatgaaccgattaaatctcttttctttataaattacccagtctcaggtagttctttatagcagtgttagaatggactaatacagaaaattggtaccagagaagtggggcattgctataaacatacctgaaaatgtggaagtgactttgggactgggtaatgggcagaggttggaacagtttggagagctcagaagaagacaggaagatgagggaaagtttggaacttcctagagacttactgaatggttgtgaccaaaatgctgatagtgatatggacaatgatgtccaggccaaggtggtctcagatgcagatgaggaacttactggaaactggagtgaaggtcactcttgctatgctttagcaaagagactggtggcattgtgcccctgctctagggatctgttgaactttgaacttgagagagatgatttaggctatctggtggaagaaatttctaagtagtaaagcatttaacagtgggtgcttctaacagtgtatgcttatatgcatgtgcaaagagattatctgaaactggaatttatatttaaaagagaagcagagcataaattttggaaaatttgcagcccagctgtgtggtagaaaagaaaaacccattttctggggaagaattcaagcaggttgcagaaatttgaataagtgaagaggagccaaatgttaatagccaagacaatggggaaaatgcctccaaggcacttcagagaccttcgtggcagcccctcccatcacaggcctggaggcctgggctgaaggccctgctgctgtgtgaagccttgaaacctggcaccctgcatcgtgatcactcagctccagccatggctaaaaggggccgaggtacagctcagccattgtttcagaggatgcaagctaaaagccttagtggcttccatgtggtattaagcctgcatgtgtgcagagggcaagaattgaggcttcggagcttccacctacatttcagatggaaacacctggatgtccaggcagaagtctgctgcaggggtggagccctcatggagaccctctactagggcaatgcagaggggaaatatggggttggagtccccacacaagagtccccactgggcactgcctagtggagctgtgagaagaaggccaccaccttccagaccccagaatggtagatccatgaatggctcacactgtgcacctggaaaagccacaggcactcaacatcagcccatgaaagcacctgcagggtctgtgccctgcaaggttacagatatacaactgtctaaggccttgggagcccaccccttgcatcagtgtggactggatgtgacacatagagtcaaaggagattattttggagctttaaggtttaatgactgccctgctgggttttggacttgcatggggcgtatagcccctttgttttggctgaattctttctcttagaatgggtgtatttacccaaggcctatatccccattgtatcttgaaagcaactaacttgattacttgtttttgactttacaagctcgtcggtggaagggaagtcttgccttgtctcagatgagactttggacttggacttttgagttaatgctagaatgagttaagactttgagggactgttaggaaggcatgattttgttttgaaatgtgagaaggacatgagatttgtgaggggccaggggcagaatgatatggtttggctctgtgtccttgccctaatctcatgtctaattataatcctcagtgttgaaggaggggcctggtggaaggtgattggatcatgggggcagtttctaatggtttagcaccatccccttagtgctgcttgtttaaaagtgtgtagcacctcctccacccccctctcttctgccagccatgtgaagatgtgcttgcttcccctttgccttccactatgattgtaagttttctgaggcctctccagaagcagaaacctgtaccgcccacagaaccatgagctgattaaacctcttatcttttttcttctttttcccctgagaggagtctcactctgtcactcaggctggagttcagtggtgcgatctcaacttactgcaacctctgcctcccaggttcaagtgattctcgtgcctcagccaactgagtagcggggattacaggcacccaccaccatgcctggctaatttttgtatttttagtagagatggggttttgccatgttggccaggctggtctcgaactcctgacctcaggtgatccacccaccttggcctcccaaagtgctgggattacaggcatgagctactgtgcctggcctaaatctcttttccttataaattacccagtcttaggtagttcattttggcagtgtgataacagactaatgcagatggaatttatcttctgataatcttggggcttggattttaaaccacacatagggaaagagacaagagctttagcttggtcaacatggaaattgaaactaagatacctatctaaagccaggatgctcaaagggctgtcccttcaatgaaagaggtagccaggaaaaaaaaaaaaaaaagctatcccctgtatcccctgacacaggcagccaacaaggaaacatatttgtttcagcctgggtagaaaaataaataaaaatctgctctggtaaattgtaactttatgactttctcatttgggaattgtattaggctgtttttgtgttgctacaaagaaataccagaggccaggtgtagtggcttacacctataatcccagcactttggaaggccaaggcaggtggatcacttgaggtcaggagtttgagaccagcctggccaacatggcaaaaccccatctctactaaaactacaaaaaaattagccgagtatggtggctcatgcctgtaatcccagctactcgggaggctgagggacaagaatcgcttgagcc[132 bp omitted]ttaattggctcatggttctgcagctgcacaggaagccatgtggcatctgcttttggggaagcttcaggaagcttctaatcatggcagaaggcaaagtgggagcaggcacatcacgtggtgaaagcaggagcaagagagagcaaggtgccacacttttattttatatatatatatatatatatatatatacatatatatatatgtacacacacatatatatatacacacacacacatatatatatatatatatatttttttttttttttttttttttgagatagagtctcgctctgtcaccaggctggagtacagtggtgtgatcttggctcactgcaacctctgcctcctgggttcaagtgattctcctgcctcagcctcatgagtagctaggactactggcgtgcaccaccatacccagctaatttttatatttttagtagaagacagggtttcatcatgttggccaggatggtctcgatctcttgacctcgtgatctgcccgccttggcctcccaaagtgctgggattacaggtgtgagccactgcacccagcctgttgtttttatatattttttattttatatttttcagactgctcagcctcttgagtagctaggattataggtgcccaccaccatgcctggccaatttttgtagttttactagagatggggtttcaccatgttggccaggctgatctcgaactcttggcctcaagtgattcgcccaccttggcctcccaaagtgctgtgattacaggtgtgagccaccatgcccagccaaggtgccacacttttaaacagccaggtcttgagagaagtcacttgctatcatgaggacagcaccaagggatggtactaaaccattcataagaaatcaacccccatgatccaatcacctccctccaggcaccacccccaatactgggaattacaattcaacatgagatttgggcagagacacacgttcaaactatatcagggattaaatcatattatctttgtagtggagaaattccccaaactctgtaaactaacatcaatgtagtcatgaacacataatattgagatgtgattgcagaagtgaactcaacccagatctcctagcaataacaaagataaaacccagttgaagatgagctcataatccataattacaaatacaggagaaaacaatcctggaggagggagagtcagcagacacaacaaactgcaggaccaggctcccatgaatagcaataatgatcagatacagattagagactttgttttaaagaatgaaaaacacaaaagacggaacccaaagcataagcaaataatatgatactttgaaaaaagtcagctttagagaaggaccaaaccaatcttgtaaaaattaaaaaataggttttatttatttttttcttaaaattttcattattttctctgggcacggtggctcacgcctgtaatcccagcactaggggaggccgaggcgggcagatcacctgaggttgggaattcgagaccaacctgaccaacctggagaaaccccgtctctactaaaaatacaaaattagctgggcatggtggctcatgcctgtaatctcagctactcgggaggctgagtcaggagaatcgcttgaacctgggaggcagaggttgcagtgagccgagatcaccccattgcactcctacctgggcaacaagagcgaaactccatctcaaaaaaaaaattactaattatttatgagtaacaaaagcccaatatgtgttaaattaaataatttttttgaaaaatagctatttttcacatagtaagactcacaaaaaataactatttttctaaacaacaagaaaaattcattagtgagaagagtcccaactgctttacttttttgagacagtcttgctgtgttgcccaggctggagtgcagtggcgtgatctcgtctcactgcaacctccgcctccccagttcacgccattcttctgcctcagcctcccgagtagctgggactacaggcgcccaccac[186 bp omitted]gatgaaagctagattctcttatctacttctttattcagcctgttataatatcacaccagatagctgctcaaaaattcctctggacactcatgagaaaatgagagtgcaaaagataaattatgtcttagtattataacaatagctttgacctaggatactcttcaaaggctcttgaagacccccagaccatactttgagaaccactgctctagacgaatgtcatcattttacaaataaggaccctggacctcagagagagtaaatgagaaatccaacatcacacagcctgtcaatagtaggatacagacattagatggtttgtctcacttctctgggtttaggttctcagttggaaacctgggaaatacaccctaatggcctgtcccattccctgtaagttgcaaagactatcacaatgtattacccccaatccactttttaaaaataaattaataattttaaaaataatttaaattaataaatcaacaaacttggtaaattttgcaacaggcatactgtgtttgaatctaaactacaatatttgaattctgatttctatttgaacagaacactaaggcaaattcgactgcatcctattccatgcaagctagtaatgacaaactgcacagtaaatatcacaggtaaatatggaaagcagattacccataatatcagtatttatcatatatcctgtgtctgaaatataattcaattatacatatttcagaaaaatgttatcaagtactagctgaaagggtggtgggtacattaagagactgcaaataaactggtgatcacaagaacttttttagataaaatggagttgcaccgaaatgtagatatttttcattccctaacctgaccttatttttgtcttttaaagaaaatcaagaaatcttcttggccacctagagatgatttcctttgtatcctaccagatggttcagatcttctttaaatggaacatagttttgttcttttaaagaacacagggcccagaaggaggaaattgttcccagggaacccactcccaactttcatttttttcaggctctacattctttggttctgaatcatgagtcacgtccacttctcctttcattaatacagtaacataatggtaattcttctcagtgaaagaattcacaactgaggcaaagcgaacatttttcaggtgaagagcttcttcccaggtttccctttgagcacattcttcccagttcttactgaactccaaaatgacccccagaaagctgaaaactgctggctccaaatgaccctttcctcctccccaggaggacacaacacggatgcttgcagctggtcaccacaactcagactctgactctgggcggccgcccctgcggcttcatgttggctgtcatagtgcaagcaggaggaccaaaaaa[136 bp omitted]atggtgaaaccccatctctactaaaaatacaaaaaaaaaccccaacaacaacaacaacaacaaaataggcatggtggcgtgcgcttgtagtaccagctgctcagggtactgaggccagagaatcgcttgaacccgggaggcagaggttgcagtgagctgagattgcaccactgcactccagcctgggcaacagagcgagactctgtctggaaaacaaagcaaaacaagtttagtggatggattaagtagcagattagaaagagctgatgatataatccagtaactattaaatgaaattaagaaaattccttgtaaggtagtatggagagacaaggagatagaaaatataaaagatatggaaaagagatgcagatagttttacacagtccaatagaaatataatatgagatacatacatgcataatttaaattttctagtaccaacctaacagaaagtaaaaagaaacacatgaaattaatccaaaatattatttcattgtgtaatataaagtcacgaataaatattttatattctttttttcctactgtctttgaaacccagtgtgtattttgcacttataccacacgcagctcagtttggactagctagtgctcaacagccatatgtggctagtgactattatactggacaatgcagatctaacttacatgtaataagatttccaagatagaagggagacagagaaggcaatatttgaagagataatggcagataattttccaggattactgggaggcaggaatcctgagattcaggaaagctggtgcatcctgatcaggatgtaaatattttgtagtgaagctgataaaagctgaaaacaaaaaatttgttaaaattaactacagggaaaagatggattacctacaaaggaacttcgattagactgaagacagtcacctttaaaatgttgactgaaaagttacaatgtaggaattttatacccacttgaactatcaataaagagtgagagtaaaataaagtcaaagacaaggttatcactaacagactttcactaaaagagaactgtaatacaattcaaatacgataaggtgtctggaggtctggggagatgtggcagtatgtgagagaagggttccccaaaagagataaaaatataatgtacattttccttgttttttactatttttccccctctccagagctcgaatggtaatgaatgcatagttatggagtcagcactagtgtagaactgcaagccttaactccttgtcatagcgttagggaagcaggagcctaggagagccagaataaggtcattttaaaatcaactccatcttttttttttttgagacggaatctccctcttgttgcccaggctggagtgcagtggcccaatctcagctcactgcaacctctgcctcctgggttcaagcgattctcctgcctcagcctcctgggtagctgggattacaggcacctgccaccatgcccggctaatttttctacttttagtagagatggggttttgccatgttggccaggttggtctcgaactcctgacctcaggtgatctgcccgcctcagcctcccaaggtattgggattacaggtgtgaaccacctcacccggccaatcaactccatcttaaaaccagcaagacacaccatgcgcagtggctcactcctgtaatcccagcacattgggaggctggactgggcagatcacctgagatcaggacttcaagaccagcctggccaacatggtgaaaccctgtctttactaaaaatacaaaaattaggcccagtgtgatggtgggcacctttaatcccagctactcgggaggctgaggcagaagaatcgcttgaaccttggaggcgggggttgcagtgagccaagatcgcaccactgcactccagcctgggcaacaggagcgaaactccgtttcaaaaaaaaaattagctgggtgtggtggtgcacacctgtaatcccagctacttgggaggctgaggcaggagaatcgcttgaacccagaaggcagaggttgcagtgagccgagattgcaccattgcactccagcctgggcaacaagagtgagactctgaagaaaaaaaaaactagcatgacccatggtcataagatgtttatagttgaggaaacaacctaaagattacctgcaaggacagacttctacaaaaacagaaaagcccagatgtcccaatacccataacaagatttgctttcaagataattatgcttttttttaaagatagttatgctttgatgtactcacacagtagaatgtcaaggataggtttctttaaatcaataccataataaatttggtcatgctgtctgcccatccgcatgtaggcacagcttagtttagtctttgtatagacaaagatccctatagaagaaaaacttaaagactatgtgttcctccacttgctttccaaggacactctattctataatggagtagctttcaataaactatctcttctcactgcactccgattctccttgaattcttcccagtgcgagagccaagaaccttctcttggggtctggaccaagactcctttttccagtaacaatagggtaggagagagaggagaaggaggagcatatatgcttgtattggcaggatagtacatcatagtattcctctatttgctcaactttgggatacaaaatgtttagaaagatcggtgaacaatcaagagctatatagaaaaaaattgttttggaatatagagtagcatagggaaaattagggctgtgtagcatgtttgggggtggcatgaggacagaaagaagcgtgacagggaggggagggagacgagactgagggtgaggaagcttaagatgggaactagaactgacaattgatca[132 bp omitted]agtaaccccgtctctattaaaaatacaaaatcagtcgggtgtggtggtgggcgcctgtgatctcaggtactcgggaggctgaagcaggagaattgcttgaacctgggaggcggaggttgaggtgagccgagatcacgccattgcactccagcccaggcaacaagaacaaacaccgtctcctaaaaaaaataaaataaaataaaagggaaatagaactgacaattgatcaccactctattactatgaaaattatctattaaagattcatttagccctccaactgggctccctgaggaaggggagtagtgggtgctaatcagctaatttaatcagcgacttaattgcaattttaataactgccactgattgaatacttatatatgtgtcagtaatagcactgaagtgttctagtgtctttaaaaatttaaacttcaaagctgggcacagtggtgtgtacctgtagttctggctagttgggagactaaggcaggaggatgtcttgaatccaggagttgccttggcaacatagcaagaccttgtctcttaaaaaaaataaatttcaacaaatctgtgaagtaaaattttaaaattgtggtgaaatatgaataacatcaaatttaccattttaaccatttaaaattgtacagttctggcctggcgcggtggctcacccatgtaatcccagcactttgggaggccaaggcaggcagatcacttgaggtcagaagttcgtgactagcctggccaacatggtgaaaccctgtctctactaaaaatgcaaaaattagcagagcgtggtggtgggtgcctgtagtcccagctactcaggaggccgaggcatgagaatctcttgaacccaggaggcagaagttacagtgagccgagatcacaccactgcactccagcctgggtgacaatatgagactccatctcaaaaaaaacccaaaaaacaaaaaacaaaacaaaacaaaaaaaagttatgtggcattaaatacaatcacattattgtacaaccattaagtaaaatcaatttttaaagtagttttactgatgatcaaactttgtatcagatagttaagtaatttgactattagttggtagcagagataatattgagctccatgtttgtctgacttcaaattctgcgctcattttctatagcatgtagtcctgcaaccttttggagggagatgagattcaaacaagtgaaacaggctgggcatagtggctcatgcctgtcatcccagcactttgggaggtcaaggtgggaggaatcccttgaggccaggagtttgagaccagcctgggcaacatagcaag[134 bp omitted]aaaccctctctctactaaaaatacaaaaaattagctgggcgtggtggcgggcgcctgtagtccaagctactcaggaggctgaggcaggagaatggtatgaacccaggaggcggaggttgcagcgagcagagatcgcaccactgcactccagcctggacaagagagcaagactccatctcaaaaaaaaaaaaaaaaatcagcccggcattgtagggcatccctatagtcccagctactcaggaggctgaggtaggaggatcacttgagcccaggagttcaaggctacagtgagctatgatcatgccactgctctccagcctaggcaacagagcatgactctgtctctaaaatcctttttttttttgagacgaagtcttgctctgttgcccaggctggagtgcagtggtctgatctcggctcactgtaacctccacctcccgggttcaagtgattctcccgcctcagcctcctgagtagctgggattacaagtgcctgccaccatgtccagctaatttttgtatttttagtagagacgggtttttgccatgttggccaggcaggtcttgaactctgacctcaggtgatccacccacctcagcctcccaaagtgctgggattacaggtgtaagccactgtgcccagcctgtgtctaaaaaacttaaaattaaaaaaaaaaagtaaaaataaaatttacattaaaaaaatttaaaaattgacgtaataaaatcacagactgtgttaaatgctaggaaggaaatagaatgatgtgatggttactagattgaaggcataagagattacttatgatgggattgcacagaaggccactttgtggaaatgacctttgagctgaaacctttgaggggaaaatataaaggctttgaagtgagaaggaacgtggcatgttagagtcaaaaaaaaaaaaaaaagaaaaaaaaaagaaaaggtcagctgagcaaagtgtgtaaggggcaaagtgataagagtcgaagttggagaagtaggcaggcgccagattatgcgacactttgtggaccacagtaaggaggatgctaaccagactctcacaaggccagagcattagagatatacagaggaggtacaaagaatctcaaagtggggaagaatggcatagtaagagggtgagtgtgacactgagaatgtcacatttctgagaatgactttcattttagtaatacttacatttagggacattgttaacctgtggatgcaatcaatgacaggtgactactacacagtagtttgtgatccctataatatagagtctcagtattatgtaatgaagatggcctcccaaagtgctggaattacaggtggtgagctagattttattatccctgttttgtagatgagaaaaccaaagatcagagaaattaagaaacatgttaaagtcatcagctactaagtggctagcctagttgaaggcaaatattggattttccttcctttgccctggagatgccatgggaaaatctcataaatctctctctctctctctcttttttttgagacagagtcccactctgtcacccaggctggagtgcagtggggtgatcttggctcactgcaacctccacttcctgggttcaagaaattctcctgcctcagcctcctgactagctgggattacaggcacacaccaccatgcctggctaatttttttgtactttcagtagagacggggttttgccatgttggccaggctggtctcaaactcctgacctcgtgatccgcccgcctcagcctcccaaagtgctgagattacaggcatgaaccactgcacctggcccctaaatctcttttatgccatttataatgattgaaagtccagtctagcctaaagcaaaactttaatttcatatctaacttaaagcttttcccctgtctctaagtctcaggcagttgaaaatttgtgtttggtctgcagtttcactcttttcattctccaccctctcactctgctgtttctgggtttcctccagggtggaggaggttttggtgaaagcagagaagtaggaggaattaaaagaggtcaaggtctcttctcttacatgactgatgacgtcagaggcagagacccaggtgctggttctttctcgttgggagcatttatgtattcttgtgttctttggaggatctacctgtggatctcaagactcccatcagtgactgcctcctgaagtccacacttccatcaacttatttctgggtctccttacactagcatacggtcctactgaataggttcctttaagaaggtcccggatgatctaccttttcagcatcctcttggctcataagaaccttgccatgtcaaacacagggagtggaagctaccctattgttgccttttctccctgtcctattgtagagtgtgccagccagcttccctaattcagaattctgcaggctagaagtgggtgcccatcttcatgaatgtgcacacatgccaaactcctcaagagacatgtctagttcatctcaaaactttcaccatgatgatcacacagggatgggctcataagtttccacagtcagcaagactcactagcttgggagaaagatctggcagacactcctagtcttttacagtgggggtccccaaccctgggccaaggaccactactggtcagtggcctgttaggaatcaggcctcacagcaggaggtgagcggctggggagccagcattactgcctgagctccgccccctgtcagatcagctgcagcattatattctcataggaggcaaaccctattgtgaactgagcatgccagggatttaggttgcctgctccttatgagaatctaatgcctgatgatctgaggtggaacggtttcatcccaaaaccatcccccctcctcacatccgtggaaaaattgtcttccacaaaactggtccctggtgccaaaaatgttggggtccactgttttatggtactccctctttgtagtgaggccagcactctatcctctcctatgatttcttctaaagcctcccacctcagcctcccaagtagctgagactacaggcgtgcgccaccatgcccggataatttttgtatttttagtagagtcgggggtctatgttgcccaggctagtctcaaactcctgggctcaagcgatatgcccacctcgccctcccaaagtgctgggattacaggcatgagccaccgcgccttgctagaagccatttaatccaactctccatcaaagtcatgaatcctgtttacaacaacctgatgagatgtcaactacttttcacgtgaacacacccaggaattaggaaggcattccctaaccggcagctcttatctctcccaatcacgatttgagcttcaccaaataactcaaacccctgtttcctcacatattaaaggggagtaaatatctgctttacagaacattgttgggagaataaaaggagatagaggaatataaatggcctaatccacttacagaggagggtgtgcaatgttagtcccctttttgcctccttttatgggacagcacattccatttttggatcgtcatcacctagagaaaggtcttccttaatactgaattgtctttgtatccttttagcacctttcttaagtttaaccctaagtggtctcatagaatgtcatttttccgtccacacgacgtcttcactgatatctgtgactttagttgaaggggctgaagatattgggaagaataattcaattttttccttcctccgtccctccctccctcccttccttccttcctttttttttttttttctttgagctggggagctgggtgaggcttctgtggattcccaagaggtatttgtggcgtgaatggagcaaaggtgatgtttcacttcatcacgtccagcactgtcccaaggttaaatgggcgcgtgaggacagttttctccggtcctggcgggtttgcccacctgccggccagcgttctgcgggagtcaagcctggaaagcgtgtgtgcggcgcacaggcgtcagacactggaacgcattcgaatggtgctattctttgccacatagcgagcactttataaggtcacttatcgtcccgaatgaatggttaaatcgtggaagccgcaaagaaagccacgcagctttgactcaatacctagcccagtactcaggaacccctctcaggggtgcgcgagcggggccggaatcaagaagcctcttttggggtgggcggggaccgatctagagctcccactgcggggcaccgcctcttttcctcgccggccgcccgctaggaggcgctggggagcttgcagcccacctgcgaggcggtcccgctctccccacccctcagcccgcgcccggcggagagactacaactcccggagtgctctgggaacggagccacgggagctacaggcggagggacccgagggcgggctttccgggtgtgtgtttccggcgtcggcggccgcggccggggacggtgtgagagcggtaagatggcggcggcggcggtggtggagttccagagagcccagtctctactcagcaccgaccgggaggcctccatcgacatcctccactccatcggtaaaggtcgccgcgccgcctccccggccccgccggcccagctcggcttatgtcggtcggcggcagcggagaggggcccggctagccggctctgatgctgctgactcactgtgtgaggggggccgggccgggggcgcaggccgctcggagctccccagagcctcccaggtctcactcttgtgggagggcttgaggcaatccccgggtcccctcgccggctgctgactcacggggggctcagcgtagggtgggagagtgggccgagccgggcccccggggatccctccctagccatgtccccggctctggcccgcacgagctggtctgggacccggagcagtgccggccggcgtgcttgtcacggactggtcctagagtctctacttgaaaggccttggcgaaaccagctctggacaggcatttcccgccgttgtaatcagcacagcctgctccgggtgggagcgcgagcgcttgctcttctctgggagtttccttccacgggacgctgggagctgctactcctcagccccacggcagaaagctccactaagaggagggtctctttcagaatgtgggaaattcaggggtgacacacacctcagattggcatttggtttgtggaggtggccgagacgctcatctgctctgtgtagggtgtaagagtgaggtgttggagcgggaccgcctggctagaggaggtgactaatctttccagactgcctgtaggggttggaagtgagttaagggagttagttgtcagccgcggagttcagggaattctttggaacgggtcggctgcatgttgccggaaaaattaaaatttcttaacgctgtaataacgatggtcttacacctacacacaacaggaaaactgaaatgggaatcccagccagtcgcttccggcagctttctgttgggattcaagtgtgaacagaaatttattacgacagaagaagacgttaatgttcactcataaaggattcaattagggcttggactagctcttcactgcacatgtaatggcatctttgtagtgtagtttgggaagatctgaattggctcaacaagtagtatgagaatgcacctgtatgtgggacttgcaagatgttggcatttgacttagtgtgttgaattttggtattccagacctgcacggagaaaggacaatgacaagatcttgatactttatcattggggatactagagaaggagaggaagtgggcgtcaaggtgtatctttgaatgatattggtaaaaggtgtttcattttaaaagttctgatcttaggtcagttacttctacggaaccagagtcatctcaatcaccgttacatggatattttattctgagtacacactattatttagaactaatgtgaggagcatgaattttaatagtctgtgtctagtgtctaatattttttctttcataaagtagaaattacgtcaaatattacaattagagtatttcctgttggcccactattctaggggagagttccctgaaagcttcactgttagagcaagcttgagtcatggtggttgacggccttactttttctggactccatcatggtttttgtcaagtcatgatgctttgtaagagtagtagtaactagtgatgatcactacaaacttggagaggctattccatgtttgaatgttaaaatagttattaactgttgaaaataggacagatagcacaaagttattttaacagacctcaatgcattaaaaagcagcagtctcccctaagtgtagctgtgcaggatctggggctttgatagagttgtttttcttgaatggctttatagacctgcttatccctaacacacccatcagctgaggctttgcacagacctaaagtttattgaaacgcttttgacttacaggcatcagtaacttggtcaattgattttagtttgtggcataaacgcacaggcatgtttaatatcttcccataaaatagtgactggaacagatcttggcaccataagtatgaaggatttgttttgttttaatttcactttaaccaagtgaccacaacagaaacttagtgtatgtaggtaagcaaaattctgctgggtagaatgaaaaggcacatttaaaatcaaagagaagaatcctttttttatgatttacatggagcatattctacgtatatatgatcttttttttttcctggcttagagttttttttttttttttaactctagaatttgtcttttggtaaatatgtttgagtttgtaatggatcttatgagggtgaaatttccctcagtcttcattttttggtcagaattttaagagggtttgcattttcctctcccagtgaagcgtgacattcaggaaaacgatgaagaggcagtgcaagtcaaagagcagagcatcctggaactgggatctctcctggcaaagactggacaagctgcaggtaagtgctacacatggattgtatctgaaatgctcagtgaaattcctgtcttttgttggagtgaagaatcatgggactgatccacaaactgaattcagctttattttcttggcaacttgttgagcttcagttttttagcaggcaattaagtggcctttaaactcacttctttcctggtagtttagttttgcaaatgagagacaatcttatttttgttgggatatagtgatttctgatttgtttctggtttttgaattctcactgtattcccttacatagaggcagcaacagtcttcaataatttcactgagcaactctgatgtatttaagatagataacaactttaagcgcctgatttaaaaatgacaaaggattttgtatccaagtgactcactgtcatttttttttgatagattcagaatgagaatgaataagacattaaatggagccttcccaagacttctgcattcatacctaggactttgtgcacatcattgctcaaacattctagttgtaattgaaccattgactgattagatttgacataatattctgatgatgggtgtgtccttggaatgagaagggagtccttttgatcaggaaggaccttttaccagtaaagtggtaatagtatttagagagaagtctgtttaaacttaaatgggtgatttttgtcaagtttaaagtgaatttagagcttatttgattagattggattaagatctggtaagtgacctcatgaattattttccctaaaattatgttgttcaagagaatgatgggggttagttagcacaacttcttcaacttgagaactaaagattttttttttctttttctttttttttttttgagacggggtcttgctgtgtcacccgggttggagtgcagtggtgcgatcttggctcactgcaacctccgcctcctgggttcaagcgattctccttcctcagcctccggaatagctggaattacaggcacgcgccaccaagcctggctaatttttgtatttttaatagagacgaggtttcactgtgttgatcaggctggtcttgaactcctgacctcatggtccacccacctcggcctccgaaagtgctgggattccaggtgtgagccattgtgcccggccagtgatttttttcaattaaagataactaacttattaattattaggctcagtctatagagctgaataaagatgtatgaaattgtgaggatgtgtttacatgggccttatatcttacttaaaacatcattaagtagctataaaaagaaccatccataatggtttttgagtgctatgaacttttttttttttaattattattatttttgagacagagttttgctcttgttgcccaggctggagtgcaaatggtgcgatctcggctcactgcaacctctgcctcccaggttcaagcgattctactatctcagcctcccgagtagctgggattgccagcatgcgccactatgcccggctaattttgtatttttttttttagtagaggcgaggtttcaccatgttggtcaggctggtcttgaactcctgacctcaggtgatctacctgccttggcctcccaaaatgatgggattacaggtgtgagccactgcacctggccaagtggttactcttctaaacacatacatggtttaacttaattgaatcctcgaaacaacttgaagtaggttttgttaccattttacacatgaggatactgagcacagaaaagttaaataacttaacaaagctcattcaactaataactggtagacctaggatttgagctcatgtagtcttacttcagagcccatatagccacatgacatcatggttattgctttcctataactgtctacttaaatgaattatcattggtgggtggtgtcttttcatcttaggctgacttccttcctatttaacatacataaggattccacttgtctgtcagttaatttgagcttggggggttccaaaacagttttgataattactccatgcaaaatataataaggtaatttttctgaattataaagccaactgaagtgatgtgaaaattttttttgttgttagccaggcgtgatggctcatgcctgtaatcccagcactttggtaggctgaggtaggaggatcccttgagcccaggaatttgagaccagctctggcaacataatgagaccctgtctctacaaaaaatagaaaaattagctgggtgtggtgttatgtgcctgtagtcccagctactctggaggctgaggtgggaggattgcttgagccgaggaggttgaggctgtagtgagctatggtcacactgccgtgctctagcctgggtgacagagcaagaccctgtctcaaaaaaagatttttttgttgttgaaatatccaaatttctactttcctccagtggcatgaattaagaacagtgtgtggtatatagtcaatacttaagtaattttcatccaaaaatgttactgttttgcttgaaattcctattttatatgtattctccccttatttcttgcccttcctgccttgtgacctgagaagtttagaagtgtactgctaaagctattggaatttaatagatgaattataagaactttcaaaaacatttccatgttacttattgttttctaagaaagtttgatgagtataggtatacacaatgggaactctaaggaagtgttgaggcctacatatatttagctgtctttgctattaatgatatgtttgtattgtttgctcctgagaacagaaaatatgtctgttccattaatgttcagtttttttatgcatttaataaatgcatagcattgtgctaagtattctactcaaaaatttaagataggatccctggccaacaaaaatcacttggggattaccaaataaaacaatgtctgatgtgtaattgtgattgcaagtagtgttagtagtgttgagcatcatcagacatgatgccttggctcaggatttcatagcctaaaacttctaaaaggaatctgttgagttctgtgaggtcctgcctcaggctcccaagtggctggaactacaggcgcccaccaccacccccggttaatttctgtatttttagtagaggcggagtttcatcatgttgtccaggctgatcttgggctcctgacctcaaatgatccacccacctcagcctttcaaagtgttgtgattataggcatgagccactgtgcctggccttttttttttttgagaccgagtttcattctgttgcccaggctggagtgcagtggtgtgatctcggctcactgcaacttctgcctcctgggttcaagcaattctcgggcctcagcctccccaagtagctgggactacaggcgtgagccaccatgctcggctaatttttttttttttttttttcttttagtagagacgaggtttcaccatgttggccaggctggtcttggactcctgacctcaggtgatccacccgccttggcctcccaaagtgctgggattccaggtgtgagccaccgcgcccagccaagttctgtgaggttctgacaaggaaaatctggtcatataattacagataatcccagtaagaataggaggaagtcagtatgattttatgggacttaaaaaaaaattaactcagtatgtatgaaagtggaaggaaacaggaaatacaaacaagaatgaatataaaacagtagtagactaaaacagatgatgaactgagtctgaaaaatgcaggtgggcacagtggctcacacctgtaatcccaggactttgggaagctgaggtgggaggattgcttgaagccaggagttatgtggaccagtttggaccacacagcaaagaccctatctctgttaaaaaaaattttttttttttaaagcagcatgggtaacataaggagaccacatatctacaaaaaagataaaaaaattgactgggtgtggtggtgcgtgcctgtgtcccaggtacttgggaaacagaggcaggaggatcacttgagcctgggaagtcaaggctgcagtgagccacaattgtgccattgtactacagcctgggtgactgagtgaggctctttctcaaaaaaaaaaaaaaagaaaaaagaaaaagacatgtagggggacaactaagagatcatttgcttctttcggcgtaagaaggataacactcagtgcttagagaaaatattgtaaggctagcaggtgttagaaaggcacactgcttagctcatatttcacttctgccttttctaggaaggaaaatgattttcaaactgcaaaagatagaaataacagcagaaagagataattaatggtaggtgagagaagacagagcagatagtctctgtaaataagttcaggtctctaggctctaacagtttcttttattatcaaaaaaatagttttagcagatataactatagagccatatattattctgagaaaaatcatggagaggtataaggaagatgaggcaaatgttatcctgcctttcaagagggtaatgcaaagaatagatgtattcactgtgtgctgcacattgaaataaagaaattaaaaataaagagtagacactatacatggtcatcagtggtagagttctgggacagattatttgataaggagatagtaatctcttaaaaaaaagtggatttattgtgaacagattattccaaattcaccttagttctctctgttttgttttgttttgtttttttgagacagagtctcactttgtcacccaagctggagtgcagtggcacaaccttggctcactgcagcctcgacctcctgggctcaagcagtgctcttgcctcagcccgccaagtaactgggactacaggccttcaccaccatgcctggctaatttttgtagagagggggtttcgccatattgcccaggctggtcttaaactcctgggctcaagcagtctgcctgtcttggccttccaaagtgctaggattataggtgtgagccactgcacccagcctagttctctttttggttagctttatcagacccatagattttcaggggtctgcatgccacctgtttttgtaaataaagttttattggaacaaagccacgcccatttgtttccacattgtgtgtgactggctgagttcaggacctgctactaagaccatataacctgtgaagccaaaaaaatttactatctggctcttcacagaaaaagtttgccagcctctggattagaggaatgatatagactgtatatctgatgtaagcagggtagttgaacatttgccataatattaatatcacaggtacaggttatgaatttacaatgggctgaataactgtatccaaaacatgttaataaatggatcatttgtcaacctgaagggaagtcttcaggcattgtgtcatgaggatctgtccttgtttttctggtcagcatctggaatcatggttaaagccatttcagaagggatgcttatttttgtagatgactcagtacagttagaagacagaattaaaattcacagttattgccaaagccaggaagattaaattcagttgcgataaggattaaattatatacttaaagtatttttcaaaacagaggaagttgggggaattacctgttttgacagtagtctattaaaaagaactttaatgggctcagtctgaacaaagagaggtgttagaaaaagcaaaacatgctatcttgtgttacatatcatggccagatcaagagaattaaattgcctcctggtctactgtcagaccctacctggagcaatcgttttcatttctgggtaccacaaaataccacaagtagtacctttacaaagtagagtttgttcagaggagagcaactaagttacctagaaacaaggacttcggaggaacagttgaaatagccaaagatgttaagcttggataaagggaaaattagggaaatgtaaatgataattatctttaagtatttaaagccatgtgaaagaaggtatagatttgtgttttgtgtttcaaaaaggaataatttgttttggccaacattggaataggctgctttgtgaacatttctgtgactagaaatcattcagaattgttcaggcacaggaggaaattctgtgggagaagggacattgcttcagactacttttaaaaagctatcattacataatataattgaaataaatgcaaaaggaatttgagggggagaatcactgtagactggagttacatgggaaactcaataggacttcagatggacctaaaaggatatataaggtttatatagactgagaagatggcaagacatttcagatgggattatggcattagtgcctcttgaaagcaggagtatatactgtagtcttgtgcagaggtgaatgaggtggcagaatggcgaaaagttttaaacattgggaatcaaaggtcattactggggagtgaagggaaaagatgaacttttctactctatatcaagttcttaagtaccggacacagtcccatgcattctctgactattcaggcagatgaggatttcagggccttgaattagcattctctggagggtgaggtttgcttgccctgaattagagttctcaggagggtgagtctgcaattggagaatattaaagaggcagtggcactaaagtaattttaacctacattccaaaatacctccttagttgttgagttgaaccattctctaatttttactatttgacaagcatatctctagtttattgtttcaaaagatgtttctttagagttcatatactgccctcttctatatagtgggggaaaagctctgtgatggatcccttttttggtcatagtttaagacttaggttttgaagattaatgaggaatttaaaagagatatagcagcactttaagggcaaaacactcttctatgtgaaaagtttattcagaagagtgccagggaagtgacaatgcagaaaggctaaactggggagcactgcagaaagacaggaaaaaggaatctggagtagaaaatctctgtctaaggggaacagctgaagcagacttggaagttagaaaaaaattacccctatgacctgatcatatttattggttgtgaggaagtaattttgtgaaggtggcagggacacagcatatttcatgttctagaaaactggtttttgagattatgaatactttgctgtttatctttcattaagatggataaatgaagcagagacatgagcttttcctgcaacttcatagtaatccagtggctgagtagggaacagaatgcaaatttggtatatgatgttaacttatttttgctattctgctatttgctaggaatgctttaaactcctagtaagtttcacttagactgattccagtgatgtaagtaccgatttttatgacgttgggtcagtttcttaagtgggtattttgtctcaaatgttgatgtttactcctctttttgaattgcctttcctacagagcttggaggactcctgaagtatgtacgacccttcttgaattccatcagcaaggctaaagcagctcgcctggtccgatctcttcttgatctgtttcttgatatggaagcagctacagggcaggaggtaagtgatattaatgacagaaagtagacaatatggagaaaagtttgtttccaagaaagaaatgcctacctgcactttagtactaatgtggaagggaaaactgggaggacagcgcaggacttatcatgtcagtttctctttgttacagggcatttgatactttgggtctgttccatgctttgctttgtaagtggagattgtcagtggtccctggaatcctcattacatcagggtcacaaactgattcttgtctttgaggtattgtattgccacacctttgtaatgttttctgtgtctgtggtacctttcatcttgtgtcacaaagctccttctgagcactaattaagtcttgtggtattccttcttagcatgttttgtactgcatatatgcctttattgaggggtgagcatccatccatttgtgtctcattgtgcagaagtgactctggtgttcctgtatgtgtcccacaagttcagactagaccctgagctgtattaaagagtgcttctcagtaatcactgaatcttccaaccttctcaaagataactgtattttctgcaattcaggaagagacgcataccaaaattaaacatcattctgtaaaaagtggcagattgaagcagggtatattgtcattgcttgaatctgtttgtaggaagaatatagttgttgtttttcttatggatatattgatcagtactcattgagtgcctgctacgtgttaggcactgttttaggtattggggatacagttgtaaaaacacagtcactgttgtcatgaggattattttttaacggggaacgcaggcaataaacaaatgtaaaatggcagataatataagggcagaattgctagttggttatatgtctgattgtttgctgtagcctctgtgggcgtgaaaggtatgaaaggccatagtagcatattgaataaatgggaatttcagaaacctaggacacatggatcctactttggaatcataccttttgtaaaatctggctttaatgattctttgaatcctgatttaaacactatatactaactttatttgtagaaaattcatttgtagagtagtcttcagatttatgtctctggcaaaactgtttgatgatagtatataaaaagttagatggctattttgaattaaagtgtcagttattttaatgaaaaaattaaaagttatttagggtattag[143 bp omitted]ggtgaaaccccgtttctactaaaaataaaaaaaaattagccaggtgtggtggtgggcgcctgtagtcccagctacttgggaggctgaggcaggagaatggcgtgaacccggga[143 bp omitted]ctgatcagtaaatgttaatttgaaactgactgataaatgttacttggaagtttttgggcagaaaagttaattatggaagctgctcctttttgcacactgaagtttctgaaattatccatccccataacctagagctcactcagcggatagaacagcatttatttttttttattggtgacagagtttcactcttgttgcccaggctggagtgcaatggcgtgatcgtggctcactgcaacccccgcctcccgggttcaagggattctcctgcctcagccttctgagtag[137 bp omitted]tgcctcagcctccccagtagctgggactacaggcgcccgccaccacgcctggctaagtttttgtaattttttaggagagatggggtttcacagtgttagtcaggatggtcttgatctcctgacctcgtgatctgcctgcctcgg[221 bp omitted]aaatccattcaagtgctctgctatagttcgctagtaggatttcctggcctttgtcatatggctccctgactggttaggcgctcccttaactgtggttatatgttgtcattgttcattgcacattacatttatataaagtaaagacctttcttcctttccttagggtgaaaggaaacacttttaggcattgtatcattttatcatcagtgtcattttactttttagtaaaggctgtttttgttttcgttttttgagacagccttgctctgttgcccaggctggagtgcagtgacacaatcttggctcactgcagcctcaacctcctggagtcaagtgatcctcttgcttcagcctcctgagtagctggaactacaggcatgcaccaccacactcggctaatttttgtatttttgtagagatgaggttttgccatgttgcccaggctggtcttaaactcctagtctcaaatgatctgcctgccttgcccttccaagtcctgggattacaggcgtgcagcactacgcccggctaaggctgatttttttgatggttagcagctttgcttttatcatgaaccagagtcttattccactaagtaggacctcttttggtaatttttgtggattataggttatttgcttgttttggagcaaattgtgaatcatccagactgtctcacctgcacctcagactcaatatgggcaacctcaacatccagccatttgttaaattttgtcaattcagctttcttcattgtctgcttctccacctcttttgtatttgttctctctctctctttttttttttttccccgagatggagtcttgctctgtcacccaggctggagtgcagtgttgcgatcttggctcactgcaacctctgcctcctgggttcaagcaattctcctgcctcagcctcccaagtagctgggattacaggtgcccgccactgcacctggctaatttttgtatttttagtagagacggagtttcaccatgttggccaggctggtctcgaactcctgaccttgtgatctgccggcctcagcctcccagagtactgggattataggcgtgagctactgcgcccagctgtggtctctctttacaactaccatctagtttggttcttaatttttttttacttggactactgtaaaagcctcattccatcattgtcagagataccttaccaaatagccctctgataattttattcctctccctcttctcccacaactcaaaccttcagtggctttccattgcctgcagaattagataattaatggttttctataatacaacctactgcaacctactgcagtagtctaatctcccaggactctactaagcatatcaaatatgtcagccatgttggatccctggctgtttgctgaacaagcctgtataaccctcatgctgtacctttctcttccatagtcttatctcaagttctacctcctctgaactctttccttcctgactttaatgtggttttaactctttcagtgactcacattgtattttgtacatgctctgagtattctgccttgtatgacagtggctttacacttgccttgtctcctttactgtaatacaatctcactcaggtgaagcactatgtgccttgcagtaccacagagccttcctcattcccagtacagttcaaattccttaaccatggctacctctgaccacatccactatactagtctccttttactttctttacagctgtaattactggccttattgccttatgcttcaaactgtctggggttgggacattcatatacatatggattgctgtcagcttgatcttaacaggattttttttctttacactgtttcaagtctttgctcacatcttacctcctcagagactttccttgatcaccctatctttgtttcctttttaacaatatttattttttacaaaaattagccaggtgtggtggtgcatgcctgtaatcccaggtactcaggtggctgaggcacaagaatcacttgaatccaggaggtagaggttccagtgagccaagatcgtgccactgcactccagcccgggcaagagtaagaagagtgagagtgtctcaaaaaaaaaaaaatacatatatatatatatatatatatatgtatttttttttttgcttatatactcttaagttgtatccctagcccttagagtactttggcttgaagaagctgcatacctatttgtcaaaggaatgtatggactgtgcctgtgccttccctatggtagatgtgcagtggtatgctcacagctcactgcagcctcaacttcctgggctcaggtgattctcccacctcagcctcccaaataactgggagtacaggtacacaccacgacgcctggctaattttgtttgtttgtttgtttgtttgtatttttagtagagatgggattttgctatgttgctcaggctggtctcaaacttctgggctcaagtgatcctctggactcggcctcccaaagtgctgggattacagatgtgagacaccatgcccagccaggaaatactttgttgaattaagatctgagtttattgaattgaaatgtaagcatggggtgttgttactacattcgtttaggtaactcaaggtctctgacttggggaaataggatataatttttattcttagttcttttttctttttgagatggagtcttactctgtctcccaggctggagtgcagtggtgtgatcttggctcactacaacttctgcctcccgggttcaagtgattctcctgccttagcctcctgagtagctgggattatagtagagatgggcttttgccatgttggccagggtggtcttgaacttctgacctcaggtgatccgcctgtcttggcctcccaaagtgcctggtttataggtgtgagccaccacacccggccttgttcttagttcttttaaaattttttgactgggtgttgggaaagaatagacaagcaagtcataggtgggaaagaatagacaagcaagacataccatggctatcatggtagtattgaggcctgaggcaaaatgggaagttttatttatttgaaatgggggtcttggtctgtggcccacgttggggtgcagggtgcaatcgtagttcactgtaaccttgaacatctgggctcaagcatttctcctgcctcagcctcccaagttgctgggactgcagatgtgcaccactacacctggctaattaaaacaatttttttgtagagatagggtcttgctatgttgcccaggctggtctcaaactcctggcctcaagtgatctgcttgcctcagcctcccaaagtgcctggattacggatgtgagtcactgtgcctggtttaaataagacgttttagaatactgttaagacagctagaattttgtgttaaggagtttggtactgagaatatgagggaggggatttcccttgcttttttctatttgaggactaactataagacagatatatctggtcaggcatggtggctcacgcctgtggtcccagcactttgggaggccgagtgggcggattgtgaggttaggagatcgagactatcctggctaacacggtgaaaccttgtctctactaaaaatacaaaaaattagccaggtgtggtggcgggcgcctgaagtcccagctactggggaggctgaggcaggagaatggcgtgaacccgggaggcggagcttgcagtgagcgccactgcactccagcctgggtgagacactgtctcaaaaaaaaaaaaaaagacagatatatctagagaaccatcttcagcttgctattcccaaagttggtatgattcaggttatgatctgttcatttaaatgcaaggtttggagcctagaaagtgagggcatgtgagtcggggagtgagagagtgaggatgggttggttggcaagggctggggagtggaaaagtaaggtgaagaggagggaaggaagactgaaccagactcttgccaaatagtgaactcaactttccttccagggatctctggggagtagcctatgggcaacttttctggtatagtctacccaattgaaacacaatagcactttttcttttttttgagacggagtctcgcaccgtcgcccgggctggagtgcaatggcatgatctcggctcactgcaacttctgcctcccaggttcatgtgattctcctgcctcagcctcccgagtagctgggattacaggtgcacaccaccacaccctgctaattttttgtatttttcgtagagatggggtttcactgtgttggccagactggtctcgaacccctgacctcgtgatccgcccgctttggcctcccaaagtgctgggattacaggcatgagccactgtgcccgacccacaatagcacgttttaagaaacctctctactaaaaatacgaaagttagctgagcatggtggcaggcgcctgcaatcccagctactcaggaggctgaggcaggagaagtgcttgaacccaggaggtggaggttgcagtgacctgagattgcgccattgcactccagcctgggcatcaagagtgagactctgtctcaaaagaaaagaaaaaaaaaaaggaaaaggaaaagaaaaaaagaaaaaagatatccagttcgtgtaaaaaaaaaaaaatccttgctgtaggagaaacatctatgatgaccttaacttaaggctgggttaagataggtagagtgctggagttaggcacaagttctggtgccagcagcagatatatgtgatagtccagatattaaccgattagtagtccttaggtgaattcatcttatacaattgtgatatagcttgcttttattttagtttttcgttctgtcttatttttagaaaatttttatgaggtcagttgagtttagagttggagattaggtagccaccagggggctccaatgaggagttacaaaggttttgctggttctcttactggcaaatcctctgatgttacccgtcagttcaccttaggtgaatcacttagtgtctggactatcagggaaatggaggcaggtgaattgcaggagtataattcattgtttcttaattagagatatactttcaatgaccaagctctattctagactaatgaatcaacagcccaggcattctttttttttggtagatgagtgtggtaaatggtttattgaaataaaacttacagaggaatatttctaagtcctaggtattcatttttgtgtcctttgaaaaaactccctgggtaaaactgtggggggcacttcttaccctttgaagtcatgtagaactaaacacttatatttcctttgctaagactattcagagaaatattttcagttccatttatattagaaatcttactttgaatttagcttttcagaatataactcaaaactctgcaattgtgataaagcttgcttttattttagtttttggttctgtcttatttttaggtaatttttatgaggtcagttgagtttagagttggagattaggtagccaccagggggctccagtgaggagttgtaaaggttttgttggttctcttcctggtgaatcctctgaatactgtgtaatgttatctattaatttatttacagagctagaatttaggatctaaaagtagaagatcctgtcaatttggattatgtccctatagtttttccttcttacagcatttcttttcttttcttttttttgagacggagtttcactcttgttgcccaggctggagtgcaatggtgcgatctcggctcaccgcaacctccacctcccaggttcaagggattattctacctcagcctcccgagtagctgggattacgatcatgagccaccatacctggctaatttcttctatttttagtaaagacaggatttctccatgttggtcaggctggtcttgaactcccgacctcaggtgatccacctgccttggcctcccagattgctgggattacaggcatgagccactgcgcctggccagcatttcttaagagaactttggatttatataaaaacctgttgtattagcaattagttctctggagagctcagtttctcatttcatttcttttgctcttatgctctagttagcaaccttaatataaaacttgcagtaaccaaagtgatagaagatcttcagtacttaatatttactttgtcaaagctagcatgtcagggatacctgatggcgtgctagactgtctagcattgagtgctgctttaagtcagttactttgcaccttacctcactacttaggtggcagatagtagtaggggttcagagtgcctttaaataaagcttaaaagcgcttttacgtgttaggctaattctaatttcttttttttttaattaaaaaaattttttttaagactagtcaaagtgcagtagtgagaagcagggaaagagtagatcaggagctcaatctgtaactgactgtgaacaatcgagattactcattaccttcagaccagcttttatcccctttaatgcaagctaggttactgtacctgtttgctttaagagtgatgatgaattgattagttgcactgcttagaatctgaaagggaaaaagccagctggaccttttgagtcttaaaagcaactgctaggaatgaggcattagtgcttaggatgagaatttctcccctttattacctgtgtattatacattaccattactatttctaaccagggagaaatctgtgctttaaaaattcctaatctgtcatagaaatctacattccaggtctatacatgttgtttggaagttcttggtctctcctcagtaggtaggagtcttgaagatagagctcttttcctaaaaaacataatctaagcacaaaaatattttatgtgtaaaaagccaagttgatgctccattatgatataactattacacattgagatactgtggatcagacactaaatagagcaacatggataatatgtaaggagggaatttaagctgttctccaaagcatggtttgtgggaagaatttgaggacataatgttgcatgtactgtctctccttattgcaggtcgagctgtgtttagagtgcatcgaatgggccaagtcagagaaaagaactttcttacgccaagctttggaggtaggttttacattagtactcatttcaggtctctaagcatgagacagagggtgaatgtaagcagtaccatccttatcaaaagtatcttcagcaactttgtaattacctagataccgaaagattattgatggtagccccacttatgataattgctctgattgaagttttgagacagatttgctacttggctcagagtagtaagcaacaacatggtaaagttaacagtcatttgctggctataataggagacaatacattggctagatcgtctcttatgctgaatttgatgctatcatcagaaattgcatatttaacagtaacagttctgtgactgtcaatctttgatttctttctgtggctttttccccccccttcaatcaatgccttttctctttcctaggcaagactggtgtctttgtactttgataccaagaggtaccaggaagcattgcatttgggtaagtaagctggtaataagtcatctcagctagctaaatgaatgtattctaaaccacctggctactcttactaattacctgttaataatttatattctactgacttctaagaaggatttaaagtagcttacagttctgcatttgtcatgggaaaatgtcatttgaaagtttaaaaaactagctagagttaatctgtcaaatttagaggacaaatgggtagttttaagtttacttgaatttggagcagtaaaatcaattccattttaataactgaaatttaaaaaaagtgtatctatattttgcatatagtactctgttaaatttcagatttaggtttttaaaggcaaatgtttggcttactgtcctatttactatatctgcttatatacttaaaatctattttaaaaatcaagaaattaattgggtacaaatatatttggaagctggagtggctaactgaagcctttttcctgtgtggcctttaaacaccttgaaatcttctctgctttttttttttaatctatctatctatctatttattattattattattattttttgagacagagtcttactctgttgcccaggctggagtgcagcagtgtgatctcagctcgctgcaacctctgcctttcaggttcaagcgattctcctgctttagcctcctgagtagctgggactgcaggcatgtgcctggctaatttttgtatttttagtagagatggggttttgctgtgttggccatgctggtctcaaactactgacctcaagtgatctgcctgccttagcctcccaaagtgctaggattacaggcatgagccaccgtgtccggccactgcttgctttttatgagtgggtagatctggactattttttccgaacaaaagaacatggctcttatgatctattaggttgaagagtttccaatattcaatttttggactgcaaaagtggcaatttcatatggttcaaataggagcatttaaaaaataactttaataagatatggttcacttaccataaaattcacttttaaagtgtataatccagtggttttcagtgtattcactaagttgtacaaccatcaccactacttaatttcagaaagttttcagctgggcgtggtggctcatgcctgtaatcccagcactttggaaggcca[135 bp omitted]gaggcagaagaatcatttgaacccgggaggtggaggttgcagtgagccaagattatgccactgtactccagcctgggcaacagagcgagactctgtctccaaaaaaagaaaaaaatttcagaacttttttttttctttgagatggagtctcactctgtcgtccaggctggagtgcaggggtgtgatgttggctcactgcaacctccgtctcctgtgttcaagcgattctcctgtctcggcctcccgaatagcagagattacaggcacctgtcaccatgcctggctaatttttgtatcttttagtagagatggggtttcaccattttggtcaggctggtctcaaactcctgacctcaaatgatctgcctgccttggcctcccaaagtactgggattacaggtgtgagctaccgtgcctggcctcagaacatttttatcaccccagaaagaaacttcctattcattagcagccctgggcgattactaagctatttgtatctttgtagatttgtctgttctgggtatttcttaaaaatgaaatgatacaatatttgtttctctgtgattgtcttctttcacgtagcattatgttttcagggtttatgttgtagcatgtgtcagtacttcattcctttttattgctgaataatagtcaattgtaaggatatatcacatgtgtttatccattcatcagttgatggacacttgtgttgtttctacattttagctcttaagaatactgctatgaacaggttttatgtggacatgttcttctgggtatatacctagaagtggaattatactgtgtcatgtggtaactgattagctgtttaaggagctgctaagtaagctgttttccaaagtggctgcaccattttacattctctttaacattgtatgagggttccaatttttccatatccttaccaacacttgttattttttaattttagccatcctaaatagcatttcattatgtttttgttttgcatctccctaatgactgatgatgctgagcatattttcatgtgctttttgctccttcgtatgtcttgtttttttgtttgtttgtttgtttgttttttcttttgagacagtctttctttgttacccaggctggagtgcagtggcgtgatcttggctcactgcaacctccacctcctgggttcaagcaattctcctgcctcagcctcccaagtacctgggattatgggcacgcaccaccatgctcggctaatttttgtattcttagtagagacgggttttcaccatgttggccagcctggtctcgaactcttgacttagtgatctgcccgccttggcctcccaaagttctaggattacaggcgtgagccaccatgcccggccttttttttttttttttttttcttgagacactcttgctctgtctcccaggctggagtgcggtggcacgatctcggctcactgcaacctccacctcccgggttcaagtgattctcctgcctcagcctcccgagtagctgagattataggcgtgcaccaccatgtccagctagtttgtatatttttaatagagacggggtttcaccatgttagccaggctggtgtcgaactcctaacctcaggtgatgtgcccgccttggcctcccaaagtgctgggattacaggcttgagccactgcgcccggcctcctttatatgtatgtcttcagataaatattcagatcctttgcttattttttaattggttatttgtgtttttattttttagaaacagggtctcactctgtcacccaacctggatggagtacagtggtgcagtcatagctcactgcagcctggaaatcctgggctccagcaatcctcctgcctcagtctcctgagtagctaggactataggcgtgtgccaccacacccagctcttgtttttattttttattctgaagttcttttcttttttttaagtttgttttaatgtcgggtacatgtgcaggtttgttacataggtaaacttgcgtcatgcagtttgttgttcagattttttggtgctcaggtgttaagcctggtacctattagttatttttcttgatccttttcctcctcccaccctctgataggccttagtgtgtggtgttcccctccgcgttcaggtattctcatcatttagctcccacttacaagtgagaacatgtggtatttggttttctcttcctattttagtttgctaaggataatagcctccagctccattcatgttcctgcagaggacgtgatctcgttcttttttatggctgcatagtattctgtggtgtatatgtacattttctttattcagtctgccgttgatgggcatttaggtttattttttattctgtatacaagtcccttaccagatacatgatttgcaatttttttttctttgttctgtgggttgtttttttccttcgatgacgtcctttgaagtacattttaattttgatgaagttctgttacctgttttttgttgttgcttatgcttttggtgttacatctaagaaaccattgccaaatccaaagccacagggatttatttctgttttcttctagaagttttataggtttcactcttaaatttatgtctttgatccattttgagtcaatttatgtatatggtgtaagtctgtttgaatttgatattctagtttgagatgggggagtcagggaagaaggtatatttggagaacattggtatatctagaactctttacttccttcatcaacctagtgccccagtgtttcttatatagccttgtgattgctagacaagaagagagcgagattgtgtctttctgaactggataactagatttagcattttataggtagagattcccactgtatttaaatcttaggagtaagctcataggactgttggctctaatattgtccttaggaagcagaaaacttcaaagaggtgtgtttttctcttggaagatagcacattagtggaaaatttaattattgcatggggtctagaggtaaccttttttgagttcaggaatttttttttttttttaatcctgagtgttatgagggtgggagagtgagctattattaggtattaagctgatggctataaaggagaatgtcttttcctttttcaggttctcagctgctgcgggagttgaaaaagatggacgacaaagctcttttggtggaagtacagcttttagaaagcaaaacataccatgccctgagcaacctgccgaaagcccgagctgccttaacttctgctcgaaccacagcaaatgccatctactgcccccctaaattgcaggccaccttggacatgcagtcgggtaacagacgtagctattcctgggatgtgttttcttaaagctcatcttattttataggtggaaggaatgggggttggggctggagaataaaattggctgatttggctctagcttcttcagagaaccagttagaaagctacctttctaactagctgctcccctcctgttaactgcctaaaatgtattaagaacatacctatctgtggttgaccaggcaatctgacttttagaaccaaacttagaaaggtcgcacgtagaagactcccttagctcttagccacttactcagaatagtagcattttcctttgggattggcctaccccaagtctgttgactcttggagatctttgtaaagttggttgacttttccaaagggcctcaaatcagggctgaggaatgataacccaatttcagctgagtgtggtatgtagttttccgatggagtgcgtgaatgtgaggctgggaagccatggattggcaggtggaatactttcttttgtattcagcagtttttttttttactggaggcgtcattattgaaggaatgttggaattggaagcagaagacgagtttaagtgcttgtgttacctctcatctgtaaaagataatgcctactcgactcatctgtcagggatgtactgatctaggatcaggctttcctaggttgacattttgttctgctgctttctagtatgtgactttgggcaagttacttaatttatgtttagctcatctgtaaaatggtaataattggcacatgatagagcctcattaatgtttgtgttgaatgagtgacagtctagttttttgttttgtttttactttttttttttttgagacagggtctcactctgttgcccaggttggagcacagtggtgcagtcacagcttaccacagcctcaacttcctgggctcaagtgatcctcctatctcagtctcttgagtagctgggactacaggagcgcgacaccatgccaagctaactttttgtagagatagggtttcgccatgttgcccagactggtcttgaactcctgggctcaagcaattttcccaccttggcctctcaaagtgctgggattataggcatgagccaccatgcctggcctttgtttctgtttttttttttgagatggggtcttgttttgttcagccacccaggctggaatgcagtggcgcaatcttggctcactgcatccactgtctcctgggttcaagcgattctcctgtctcagcctcccgagtagctgggattacaggcacctgccatcatgcccagctaatttttgtattttagtagagatggggtttcaccatgttggccaggctggctgcacgcctctgcctcccaaagtgctaggattataggcatgagccactgtgcctggcctgtttctgtttttaacaataaacctcatgtgccagccatgacactcagagtgctgatatggcccctgttaactaatgtgtttggcaaagcagtataccagttcttgggccttattttatttatttgttttttaaccatacatatttttgggtctggcttattctctctctatactgggagatgtggaaaaatggagatgtgtctcatttagtttagcagcattaatggtttgttgggttgttgaaggggctttccttagctacagagaagagcagatattccttgaggcctctatacttaacagtagtagaaaaaggatctgattcccacaaacccaaagtgggaggttttttgagtaggctggaaggacgcatcactcaataaatggtgaagtcagaaggttcctgctggtattgagttctttggatcatgtgtcagcagcgtcatcctttgactctagtgtgctaaatactttctacatgtatctcgatgtgaaagatgttgggaagcagttgtggtaaacaaatggatggggctgaggtctgtaacttcttaaagggctggggcagagttagagctaatatacacaaatagagaattttagggtttagatgcctcccaagcttggaaagaactaatttttatgttatcccaagtgatagcataggttggcagtagtagcaggttcaatcaaagttaagctcattgggagcaactcaacttctaagcaataggggattggttaggtcaactatggtatatcagtctgaagaaatactgcttagccatgtataattaagttcatggatttggcattatgtgaaagctgtacactgagtgcatttaggcaaaagcacatccacaaatgataaatatttgaaatgaaaatataagatgttggattccctctcccatgccccatgacagttgcataaatataaaactatcaggcttagaaaagctatcttaaagtagttaatattattagaacaggtcattcaggcagtctagagatgtttaggtcaactccctgacctgtgaatgtgatgtcatggagggtaaacatggccttttcctgtggctccaaaagatagcaggactggaatggtggtgagaagcatggaagaaagatggtacagtatgtgtttttcaggtcccttttaagttgagtctctaactcctttgggaacttatattggcaatatgacattgagctgggaggtcagagacttggattctcatcttctaatctcagctgtcaaattgctgactatggtgactttgggcaggtttttttttttttagacggtctcactttttcacccatgctgcagtgcatttttgctatcacagctcccatcgctatcatcagcctcccaggctcacgtgatcctcctacctcagtctcatgagtaagtagctggggctacaggcatgtgccaccacgcctggctaattttttgtagagatggggtttcaccctgttgcctaggctggtcttgagctcctaggttcaggtgatccacctgccttggcctcccaaagtgttgagattacagatgtgagccactgtgcctggcagagcaggttctttatcctttcctgacctcatcagtaggttggtggagttgacgtagagtttttttttttttttgagacagtgtcttgctctgttgcccaggctggagtgcagtgacgtgacctcggctcactgcaacctctacctcctggattcaagtgattctcctgcctcagccacctgagtagctgggattacaggcatgtaccaccaaggccggctaatttttgtatttttagtagagatggcgttttgccttgttggccaagctgatctcgatctcctgaccctcaagtgatctggctgccttggcctcccaaagtgctgggattatagacgttagagtttacagacgtgagccactgtgcctgacctcttttttttttttttaagacggagtctcactctgtcgcccaagttggagtgctgtggcgtgatctcagctcactgcaacctccacctcctgggttcaagagattctcctgcctcagcctcccaagtagctgggattacaggtgcccgccaccatgcctggctggtttagtatttttagtagagacaggtttttaccatgttggccaggctggtcttgaaatcctgacctcagatgaccctcctgcttctgcctcccaaagtgctgggattacaggcatgagccaccatgcccggcctttttcttttttttttttttttttaagagacaaggtcggctgggtgtggtggctcacacctgtaatcccagcactttgggaagccgaggcgggtggatcacttgaggtcaggagttcaagactagcctggcgaacatacggtgaaaccagtctctactaaaaatacaaaaaattagccgggcgtggtagtgggtgcctgtaatcccagctacttgggaggctgaggcaggagaattgcttgaacccacgaggcggaggttgccgtgagctgagattgcgccattgcactccagcctcagtgacagagtgagactcggctcaaaaaaaaaaataaagagacaacatctaactctgttacttaggctcaaactcttgggctcaagctatcctcctgcctcagcctctcaaaagtgccgagattacaggagtgaacccctgcacctggctttttttttttgagacggaagtttgcccttgttgcccaggctggagtgcagtggcgcaatctcggctcaccgcaacctccgcttcctgggttgaagtgattctccttcctcagcctcccgagtagcagggattacaggcatgcgctaccacacccagctaattttttttgtaattttagtagagatgggatttgtccatgttggtcagtctgatcttgagctcctgacctcaggtgatccgcctgcctcagcctcccaaagtgctgggattataggcgtgagctgaaaccgtgcccagcatttttttttttttcaagagatggggtcttactatgttactcaggcttgtctcgaactcctgggctcacatgatcctcccatctcagcctcccaaagtgtggatttacaggtgtgagccaccgtgcccatttaggtagatgtctaagctgcctcccagctctgatcttttatggctctattattttatatgttcttattcctttcttttcaatgcccaggtattatccatgcagcagaagagaaggactggaaaactgcgtactcatacttctatgaggcatttgagggttatgactccatcgacagccccaaggccatcacatctctgaagtacatgttgctgtgcaaaatcatgctcaacacgtaggtgcaccttaactctggactacaagaactcagatccttcagcaagtctgtttgccatggcagagatggcctgagcagggagtttggccagttacagaaacagcagcagctgcggcctctagggctggctaaggtagagcgggaggatcaaaagtggtccagaaaactttcgcttgctagtctttcagaatcaggcagacattttagaaatccccttcccagctcctcttggagaattctcctcatcctttaaatattctgtcctcataggtgcagagcacaggacagagggtcaggaaatagcttacagatcagccagtaacagccaactgagccacccagaatgaggaaggaagggttaaggagaggtttgaaaaagtggacaacaaaagtatgacagacctacttataaagaagtctacagaattattcaattcttttgggaataaatgaaatattgactaagaactctctctggatctttggattacataagggctatgttttaataatacctgttacactgggatttgacttaaacttatagttctgcttgttgtgtctattgcttttggtaggttcagttcagctttctaacattggagtttttctactcttcaggctgagctgtgacccagagtggagaaaacctagcttttgcaatgtgatgggcatatgggtttaggggttgggctgattgtctgtgtgggcagagtctttattacaatggaattctgttaaaaagaaatttgcccaaaccttcctttagaagcataacatctgcagcaattgaccaagtatgtctttttttctagcccagaagatgtccaggctttggtgagcgggaagcttgcacttcggtatgcagggaggcaggtagggactcccttgactgcagttctgctcactctgagaccagcatgttttcagagtcacaacgtttgatgagaccagcactcttcagatcttcatactactctcttccttctgccccactcacttccttcccttaagcccattcagtgtgtttcccagactgttaaattcttggcctggaaagtcagcgtttggtgctcttatggacatcacgttgtttgagggacttagggaactgaactgtagcatttgcagtgagttagtttgcatttggctttgaccagaagatttatctaccacgagtctgagttgtgaatttaacataggcagggtatgaaatcttagattctccaggttaggagcctggtaaggtctggtgcatatgtgctttagagaggtctgattgcttggtgcagaaactaggttttgagatttacttctgtgcttctcagatcagtacctttctactcgtgctttgaattttgggtgtggtgcaaaaagaggccctttttttttttttgttaccttaatgcccaagtaggtatgagtgtgacttctgagagcagacagttaggacctacgcaaagatgacgtctagactgtctcctctttgtattttgcttgattatcactagtaaagtaagtgtaatctttctggatttcaactgcagtggtctctaaacacagactgattggctgtctatataatctcactgtatctctggaggagtggccacatagatgatttcttccctctctacaagtggccctaattggctttttttttttttttgagttggagtctcattctttcattcaggctggagtgcagtggcgtatctcggctcactgcatcctcctcctcccagtttgaagtgattctcctgtctcagcctcccgagtagctgggattacaggcatccgccactatgcccggctaattttttgtagtagagacagggttttgccatcttggccaggctgtcccaaactcctaacctcaagtgatccgcccacctcaacctccaaaagtgctgggattgtaggtgtgagccactgcatccagccacgcatcttccagtatagtaataaccggtactcttgaggtcaaaaccaggagctgacctgaaacttttgctgataaaaagccaattaggggctggacgtggtggctcatgcctgtaatcccagcactttgggcggctgaggtgggcggatcacttgaggtcagcagtttgagagcagcctggccaatgtggcaaaatcccagctctattaaaaatacaaaaattagccgggcatggtagtgcattggtggctgtaatcccagctactcaggaggctgaggcaggagaatcacttcaaacggggagtggaagttgcagtaagccaagatagcaccactgtactctaacctgggcgacagagtgagactctgtcttaaaaaataataaataagaaagatgcactactctcactataactagagttgaggagacaggctcagggacatccaagtgttcagggcaaggtcaggtagctaatcaatggtggagctagactttgaattagggtcattggctctaagttccaggcttttctcattttgacacttttttctgtctataggacaaatgctggagacaaacacactaatgattagccttgcaccatgtagtctactgtataagacacactgttcttatataagcatgtaggctgataaaagagcagcttctcttagtcccttgcgcctttgatgttagcttttaagcaggagataggctaatctcccagaaagatgagtgttgcagattttttgctgagtggagacttaatagcttggtcaggtgccttttttaaccatgttagaagttgttctcaactattgattataccttcatcactctgtggggtcttaacatttggtgtaatatgttaatgccgcaacctttttttgagacggattctttttctatcacccagctgcagtgcagtggcatgatcttggctcactgcaacctctgcctcctgggttctagcaattctcctgcctcagcctcccaagtagctgggattacaggcgtccaccactatgcccggctaagtagagaagggagtttcaccatgttggccaggctggtctcgaactcctgaacctcaagtgatctgcccacctcggcctcccaaagtggtgggattacaggtgtgagccactgtgcctggccttgatgcctcagtgttaatgaggtagaccttgttcagtgccttgttccaaacctagcagaatgaatcttgataaagcacagatataatagggtctaagggcaagaaggagtttgggtggatgtggcgataacaagccttggaggaagggagaagaaatcacagttctcttgtcatttttccttttagcttgtcatctctagagaatgctatattagggtcggtctgtttggaaaatttctgtttcctagtattattaagtcatttcaggtttcaaagggaaacaggttggcatatagtggtattcagtacttgcggctcttcttcccgggcgtctgaagaagaacgatggtggggcgggttcttccttttggcagaagttgtgtggacacagcatactgcttatgagacttgggtaaatgttagtgtgcagaataaatcgctttcatggtttgtctctttattctcagacagaagcattaaaatgcgtggctcaggctagcaagaacagatcactggcagattttgaaaaggtgagtatgatattgggttggtatggaatgtgagtggaagagagggacgtttaagtacttcaaaacacacttttaaaaataattatagtttcaaaagaagttgcaaatgattccatgtatccttcacctaggacagtattaaaaccaggaaatagttaagcactttgtacaatgaaacttactgagttgatataaaatatatattatttatacataatacctttctatttcaaaagttctttctgtccttttttcactttgatttttcacaacacacctatttattatctgcattttatggttaagggaactgggattcaggaggacactcaaagtcacacagcatagggtcagagtttgactctaggcctagtgcttgttccacatgacacagttgtaggcattccttcagctccagaaatgccaggtctgctcctctgtggacagaagggaagtcttgatgtgcgtacttggacccaaagaaacgtcctcagggtgatgatctaggctttctttaaccctggtgcattttgctcattgtttgggagttttgaaaagggagaaaagcctgtctgggcattagggtgagaattatatagtctttcctgaacctctctccttttagtctgagtataatgatcaacttaataaaaacaaaacctagatccagagagaaaaacttagtgtggatggagactagaccatgtggctttgactgtccctgagattcaccatcttcctggagggctcttgccaattcctattgcgtcttacttggcatgattcgcctgcttcccttaacaccttgtagcacagctgacatgaggctgggatgttgagaccattactgatggtccagtaaatcacacacatgaatacttggtctagatcattttatcccaatgtctgagatgtttgatgggacacttttattccaaatagttccttggaagaaggattctgtgattagatatttgggaaatactagggctaaacaaaatactagggctaataataattaaaacacctaattttgcttaatcattgcagagccatgttatgctgatggtcctcataaaactcccaagagctagttgtggaattcagcatttcctattctttaacctcaatgttctttttttcccccccatggagaccctatttattctgtagaatacatgctgagaaatgcttgtgtagctaatttggttcatgagctgagttgctcttggggcttacatggtttgagctgttcacctgaagcctgcagacagaaagatggtccctagggtgactccacctttttgttctattttgtattttttttttctcttagagactaccataaaatagcatttttaaaaatttatttttagagatggaggctctctgtgttgcccaagctggacttgaactcttgggctccagcagtcctcccacatgagcctcccgagtgactgggactccaggtgcgtgccaccaagccaaacttccctttcagttcttgacattccttttctgctttgtatcatgcatctccccagatctcccctaacttcattcaaccatgtagttttataagggccagcagactatctaggaagcaggagtagcatgactttaaagtgattctctgtgccaatctctgcaactggttcctttggcaggctctgacagattaccgggcagagctccgggatgacccaatcatcagcacacacttggccaagttgtatgataacttactagaacagaatctgatccgagtcattgagcctttttccagagtacaggtgagaaccctctggggactccatttctggccaggcattctcactgtagccacctcccttccacacctgtccagaatgggaactcacttctaggggtgtgcctggtgggcaagaggccaccaagagcttgggcctctgttgataaaatgaacaaaaatcgaggagagagatgctgtgggtagaggcatgtgggttgcccctgcatgtgttctgagcagtttcctcctcgcttttagtcactgcatgtgttgtacctgttttctgtattgggtgtgtgggataagagtctgtttattgtgtgtagcagtgaagggcaggcagatgggcagagaacaagagacttaagcacggccaaggagggtcttacattagaattttgagaaatacagcagttctccccctgttccctcccttctcttattggaggcaaaagtaaaactttcagtgttggtgtctctctgcctttccttttagattgaacacatatctagtctcatcaaactctccaaggtaaggagtcttaaggccatctgcagggaggaatgggacggggtggcgaggaggggtggcacatgcacctgattggcctcattggaaagctccccagcttctcagtggggaatgggcagtgtggactagagtaggagttgcattgttgctattttgttttcagtccatttggcctaagacccctccaacaaagctactgtgtcagggtgatctctgactagtggatactggtccctttaatcatgtgctttgattttaggccgacgtggaaaggaaattatcacagatgattcttgacaagaaatttcatggtaagtaacagtcacacaggcaagggggctggtggtggtgatgagatggttgaagaagtttattttcaaagaagatgttctatttgtttcccccgatggttcaccctggggtcctggcccctcttccctgtgatgagaatgtgtaataagcatgtgtacatggaatagggagatgaattctatttcccttcttttctggacacagtgagtcaactagggagtgggctgcttcacaaacacttttgtgtctaacctcatcttttacctgggttgcccttgtgtttcttgcagggattttggaccagggggagggtgtcctgattattttcgatgaacccccagtagataaaacttacgaagctgctctggaaacaattcagaacatgagcaaagtagtggattccctctacaacaaagccaagaaactgacataggtgagtgctggcttcaggaccccagggctgggcagctctgtcttctgcgtgtcgagactgaaaacctcctcctggtgtcctcatggcttcctgattgacactgctctgtcttctcttgcagagttggatctgtagcggtcctttggagagtgtgtgtggcgggagagtgaaaccttgggggaaaatgctaggagattcttttttctttttgttctacttttcgctcggaaagtttttaaatcctcatttggtgcatctgtattccagccaataggtgtgccagttttcatgtaatctttactggcccaacttgggagtggggaaattgcttaaaaaaaaagaaaaagaaaaaaaaaaagattattctaaataaaaggaaaaaggcttacactacctaaagctgtgctctctgcctcctgggagagggccgcaaagccaggcaccccgccaaccactgggggtcctaatccacctgctgggcatcacctctcctcctcctcagaattgggtgtttgctgaccatcaaaagcaatgactttttattctgtttgtactgaaccaaaacaaacaactgtgtatagactgctgttttcttttttatttgaaatgaggcattttggtgttctttcccctaccatacggcctgtctgcccttccctccccacattggctccagcagagtagccgaaggtcctgccgccgccgccaccaccaccaccactgcagcaacaacagcagcagcagcagcagcgcctgcatagctccactctgacctgtgaaggaatggggatgaggccaggagctagtgtctaccacggccacacagggagcagtgtgggcccttagcccccaaggggcctgctatgcatgtggctttttttttttttttaaacacagtaaactagattagtcgtcagtgttttaattgcccctcttctcctctcctgcattcctctcctctcttctttcctctctgtcccttctctttcccctctcaaccaggagaccatcatgtctctctgccttcctcctctcccctccaggggagtcaggctgtctgtgaaagccatgagcttctctccctctcccactcctcctctcctactttcagatggatttattccttttttaaacaatgaacatcggaaatgagactgtggggtgtggtttctctctctcttttttttttaattttctttgttgggtttttgagcaacctcatgtccccttcccagggagctttttaatttacctcttagaactcaagtggatgggaagtagagcactatgtgtcagtatgctttgttttctgacacgattacacagcgaggctttaatgccatttgggtaggtgagcttctgcacttctgttgtgctgaactgtattttcttctctcatctcctctttgtctttttctcttttcctctccttcctgccttcttctgctggcctccttttctctttctttaccttccttggattatccttccaggttttcataataaatttatattttgtaaaaggattttgttgtaccaggttttgcatcctcactgaatctgactggcttttattttcctctccaaaatcaggtttttgttctcaacatctttccccatcatgtctagtcactgttttggttttggcaccatcagtatcaaatgtacaaacggttcttgctaaccaacaccaggtatatctgatgttcagatgagttccaataaaaataatttttttttttttcaaaaggtgtctttttcttgagtgctggagggcttccaagcaagtccagacagctctgtgtggccccacactagtctagctctcatctggccaaagctgttatctcatttgtgtaatgggagtccttaaggtaaatttggggtccaaacttggagggctttgggggcaagaaagttggtgtgtgagttctgaggttggaaatgagttcaggtgtcttcttccagggcagcatggtccagtgagcacatgtaagtttgggcagtagatcctctgagcctactttctcttctactcagtgaggatgctgcttccttggcaggtgattgtgatgtgaagcttagtaagtcatagacgtgcaggtgtctggagagtcctgacatgcagttgtggtttcgtttccttttggaatcttcaaaggcagcgattttcatattgcctcacaccctggcgggggcggggggctctgggaccactgggggacctgctaaatcctcttcagtctgagcagttcagccattgtcagttttagtattgtgtctctgtatttcacttgcagaaagagctttgcttctataaaggactttaaaaagtactccaaagagatctagttttggagtagaggggagatgttttctcaaacttagggcagtcctgagatgctcaggcagtagcccttttctcagttccctttgcgggtcttggtcagatgatgccctctagacccgtgctgtccaatatgtagccgctagccatgtgcagctgtcaggcccttgcaacgtggctggttcgagctgtgatacactgcaagtgtaaacacaaaccagacttcgaaggcttagtatgataacaaaagaaaaggagtgtaaaatatgtcaataacttttttatatatgtgttgaaatattttgggtattgggttaaataaaatatattattaaaattcacctgtttcccttttacttgtgtaatgtggctgctagaaaatataaagttacctatgtggcttctatctggacagcgcagctctagacctccaggaccagcagttgtgtcactgcctcctctcccaggcctctcatgacctgagtccaggcacagctgggaaggtcagctggccggtgggctggcctgggcccggctccctcacctcccttctgggctccagccttcatggtgccaggactttcttgtgtgttaatgagactctactggagttgggagcagaggctctggtcccctgctgtgtgctagttatgtaatctgtgctgctcagaagggccactagatgctgctctgtgatccctgaaagaacaaagccgacttcctcaggagtaagggctcaggcctgctctatttggaacccttcttggaagctgtagctggcccccgccttgacctccctccctcgggatgctatgggaagtggggcatgcaggaagagtggactctccggcagtccacgggcagcccagcccagcagggaagctaacaagcaggctggcccttcaggcagctagagataggcaataggctaagtaggctgattgatgggggtgggatttggaaatcttccctgcagttctatgatgaaggcagctaggaagaaaacagctctgcctcattcaactgggtctgccttctgggtccttggttctgccatttctggcagttgactgtcctttcttccttgcttccagttggagcagtgataggaactgggggtggggaggtggtggtgggttgaatgaaaagaggagctctgtggtgtctgaaaaccagcataacaggcatggcctgggtgataggagctcctggagacccctcccttagtcgcagcagcaagtgggctgccagtgccatcccattcctgctgtgctgcaactgtgactttgccttgggcaagtgtgaggaggctggtgttctgccgagagctctgtttgaaggtgctagggaaaggctggctggacaaaggtgagaagacacagggtatggcctggcttgaaaaggcccatgcagaggcatgctgctgcagagtgggaagcagggtagtggggtgagcttggtccgcctccccgtgaattggaatagctagaattgagattgagagttaaaggtaacagagtgggcccaggtttttctagggggtggatttttctttttttagccgaagtgtcactctgtcacccaggctggaatgcagtggcacaatctcagctcactgcaacctctgcctcccgggttcaagctattctcctgcctcagcctcccgagtagctgggattataggcacccgccaccacgcccagctaatttttttagtagagacgggtttcaccatgttggccaggctggtctcaaactcctgacctcaggtgatccgcccgccttggcctctgaaactgctggacacagtgtggccatcacgcctggccggggtggattataggcttcaaaatttggacatattttgggaagtggaaaacatttaaccttggctcaacactagaatctgaaggggggcacagagccaactcaggagctagaggctccaagtaagggctgaggaaaagaggctggggttcggctttcctttgagaaggaaaagggacacttggtcagggtctcgaagcaaatcgtttcttctggctttttttttttttttttttttttttttgagatggagtttcgctcttgttgcccaggctggagtgcaatggtgcaatctcggcccactgcaacctctgtctcccaggttcaagcgattctcctgcctc[137 bp omitted]cggcctcccaaaatactgggattacaagcatgagccactgcgtcggcctcttctggcttcttactgttacatgcaggagggttgaggacagctccatttgaagagcaggtaggcttgtacactgaggaacattcacagggaggggcgcactgagctgggggcctgccttcctcttctgagttcccataacagctgttgtggatgttctgaaaggctgtggacaaagtagccctctgggtacagagcaatgcattttccactgtatgccttgccccccaaggttcctaaagcctggaattcctattgacagaaatctgagtggcacataaacaaaacccagcactttctgccttgattgcaccattttgaatgatgccagattccctttctgttccccctaggacagttgacagggctggtgaaagcctagtcggctggagtggtcaggtaactgggtggcatcctctcctctggagagccactccctcatctctaggtccagagataatctggattaagacagggcttaagtttcctgtttcccaggtttgtggtcagttttgactcgatctccagaaacaaggtaaaatagtaaatgaacaacagcctttgtgaaggatctggattcacatctgacaggaacagctttcagaaacagaattttactcaatttcgctagcatcaagttctcaaattatacatacttagaattgaaaacgtttaagagggtcagaaagctggccggaggggcagttgcttcagctttaatatgacaaataagagggcgagtgggaacttagaggtcatatttgtgacgggctcaggcttggctacgggccacgcttctctggcttggatctctgaggcccacttcggccgcggtcatctacccatgatgagggaacggaggccccggaggggtggccagaaccgattggactgtccactcgaggtgcgcgtggcactcgggaggcctcagtaaaggcgtcgcctctccccgcccagggccttcttccccgcgctccctggctgctttccacagggacggggatgtcaggtggaaggagggagctccggaccctggcctcggcggagggctcctcaccaggccagggcggcagcctcagagagggcgggccgcgcgctgccagggcagggactcggccgagagtgcccccgcggccggcagctgcgggcgccgcggcgggaacaaaggcagcacgtgtctgggcgggacgcgggcggggtcggccctcggctccgccctgctcggcgcccgccccgcgtcggcagagttgggttgcgcgggcgccgaggactctccggcggccgggctgctgttgggcggcggcgcggagcgggcggcgagctgtgcgggaggggcggccccgaggggcggggcgggccgacgccgcgtgtcccgccgcagccgcggagtccggctcctagatggggcccggcgcgtagaggtgcctcccgctcgttgccgcgtcctacccgcaccgtgcgcggctcgagctgaggacaccaacggccgcgactccccggcgagaccaggccggagcgtggacggcgcgcgcgccccgcgagggagggcgctgaggcgcgcgccggaagcgggagcgggagcgggagcgcggcggcggcggcgaaggtgcgggcggccgagcggggggcggggctgcggtgcctgcagaaccttggacagaagctccctagctgccgccgccgccgccgccgccgtcgccgccgccgagcgcgagcccagccgatccccgccgagcgcccccgagcgccgccgagcgccgggaccgcggcggcggggccgcggcgcgcattgcggagggcgcggagcgcaggagctgccgcctgccgggtaagcctgcgctgggcggccgtccttggccctggggagcggagaccggggtcgcgcccgtgcggggtgtccaggcgggggtcctcggccgcctccgtcggcgaccgggcccctcccggctgcgcctggggaccgcagcggcggcggcgggcgggggtgctgcagtggaggcggcgaggctgcgtcgcgggggcgcgggtagggcccgggactggggcggcggggtgcgccgaggcgcggggcggaggggcgcaggggcgcaggggcgcggcgcggagcccagcctggcgctaagaaccatcttgttttccaggcagatccaagggggcagcacgcttcccgggagcgcccccgcctcctctccggggccgccgcaggctcggtgagcggttttatccctccggccggcaggctgggcgcgcaggggcgcgagcccccgcccggcgcgcagcagcaccatgggcacggtgctgtccctgtctcccagctaccggaaggccacgctgtttgaggatggcgcggccaccgtgggccactatacggccgtacagaacagcaagaacgccaaggacaagaacctgaagcgccactccatcatctccgtgctgccttggaagagaatcgtggccgtgtcggccaagaagaagaactccaagaaggtgcagcccaacagcagctaccagaacaacatcacgcacctcaacaatgagaacctgaagaagtcgctgtcgtgcgccaacctgtccacattcgcccagcccccaccggcccagccgcctgcacccccggccagccagctctcgggttcccagaccgggggctcctcctcagtcaagaaagcccctcaccctgccgtcacctccgcagggacgcccaaacgggtcatcgtccaggcgtccaccagtgagctgcttcgctgcctgggtgagtttctctgccgccggtgctaccgcctgaagcacctgtcccccacggaccccgtgctctggctgcgcagcgtggaccgctcgctgcttctgcagggctggcaggaccagggcttcatcacgccggccaacgtggtcttcctctacatgctctgcagggatgttatctcctccgaggtgggctcggatcacgagctccaggccgtcctgctgacatgcctgtacctctcctactcctacatgggcaacgagatctcctacccgctcaagcccttcctggtggagagctgcaaggaggccttttgggaccgttgcctctctgtcatcaacctcatgagctcaaagatgctgcagataaatgccgacccacactacttcacacaggtcttctccgacctgaagaacgagagcggccaggaggacaagaagcggctcctcctaggcctggatcggtgagcactgtagcctgcgtcatggctcaaggattcaatgcatttttaagaatttattattaaatcagttttgtgtacagtatgtgtctagcaaagccaccaagggcctcacctttcccacagtctctccctggggtttttttcatccctgccaagaactctgggcacttttgaactcacgagccttgcgcaaaacccagaagatgtattcagagccacccaggccactgacctcccactttggggaactcaaaggactgacctgcccctgccgcctgtgcccttgctgggtccagggtaggcaaggctgccggctgcaccctgtatggagctagagaggggcctctggctgcctggcccagggaggaattggggtttctggttggaggcccttttctggctcctgtgtggagttattcactctcccagaggctcctggagccagccaccctaactgagctgccagtggggtcgtgaggcaagatccccgccacccggggacatcttcaatctaggcgaggcgaagctgagcgggtctagtggaaagattgtgtctggtcgtttgaccacacaccgccctgatttgctgttttctttttttagggagaagggcttttctttagtggagaaatggaactcgcccccctacccccttgtctgctgctcccagccacgttggtggtattggccgatgagctggtttgactcattaatttctctcaatttgggtcccagctaaagaggtggggtgaagctggggacagctttcctgggtgagtttttcttttgaataatgtagtgcagtcaccctgtggcaaatgccaggacagctgcaggtgcccattagcaacgcctgccttctgggcaaggtgagggatgccataccttgagaccaagccggtgcccacctaagggctaaggcctcttgctggtgcacatgacatttgtcctgcagagctggggggaaggcgatgtggtgaccccacccccacccgttaatttaaagctgtttctaaacagttgagtttcttctaaagaggaagccttgcccagcaaggaccagtgagacagccggatcttggagacaattacaagacggggagtgagactcctgattgctctggaagcctgctgatttctacaactgatcatttgcagctgctggttttggtttccaccttaccctactggctgtaaaaacacaaatgtgtactttattgattttctttctaattctcccgcattggtggcttgggacttgggagagggagcaagccttcctccatggcccatcactcggctgtggagaacaaagaccaatgtgaagacactacagaggattctgtcttccaggcccagtccactggggagtgctggaatggggacctggggtggggaggcagagggtcactttacataggattaagttcgaggtggctaccgatttcagcacatgcactactgaaatttacacaaaaagaaagctgtgaaattgaagtcccaatttaagagtcctgaggcagaacctggtggctggaggcattcccagaggtggggaagagagcctgcccggccggagaacatctgccttgctgcacctgaggcccagcagagccgttcctgggactgtcagataatcggtgcagcggtggaaggagcctgcggctgctggcacagacttcacacagcacctcctctctgctgggtttccacacagcctgtcttcagatcctgctgccgcgtgcgaccagaggtgggaggcccctggtggcatggaagagggagggtcagtgccaagtctcaggaggagggcgcatgtgtgtatcaccctcagctggcggaacctggctgcgaactgtgcagttacgttgcatccacaggattccagttgcgtgtctgtttccttctctttctccgtatttatttttttattcttcggaggaggtggacatttcggaagtggtggggactaagggaagaactctctagttccctcagtgtgaagcctgtcgtgttctctccccttgcactggtcatcagtattgtgtaaaggaacaactgatatacttgagtgtgcaagcaaagaacccatttgccatgctgctatgaagactacttttagatcaacaataaaaaaaaacctacaaaaaaacctttattctttaattgttgcttttacggtgatattgtgcatgcaaaccaggagcattttgtgtcttaagaaaaataatcttagaacagatggctgtgaaaattacacccatgcacagaacaagccacaggaataatagttcaggatttggtttttctctttttcttgtaaacctggagggttgatatattctttccatgcagttattagaacttagttttgttccaacagttaaacttgcaatgaaaagaaaatgtgccatttttttcactcagaattattcatagctgtatatttgaaactgctaattacacacgtgtgatgtatgttggttttttagtgcaatttcttctgtagctattctttgaccaaactgtgggtattgttaatattaatttatatttgtctcattttgtatgtatgtgtagtgtgtttgtgagtatgtgtggtttataatctgacaaagtcatgaagctcagtttggctgtaatttaattccccttcccttatttttatttatttttgtactgtgctgattcaataaaatgcactgaccatccattacagagacctctttttgtgggcaggctggggccccctttactaaatgattcatgcactcagaacataattggatttgtgttattggggaggggaggacagagttgggggcgagggcttaacacactaaggtgattaagaaggaagcacaggttaagtcagctttggtttagcgtcggccgaggtgagggcagctgtttcccaaaggctcccgtggcagagctgggtgactggaacctccggccaaggagggtcaggcccaagcatggcctggtgaggtctggccgggtgggtcctgcaggggctctggaccctagactccctgtgtcgaggtgtgactctgaagctgctgctcccacgtattcttgggcttggctctgctctgtgctcccttcccccggggtctcccaggccagcaggggtgggctggcgtccacatgggccaaccctgcaggtttagctccatgcgggtttccaggagggagaaatccagccctgtggctcccagggaagcagccactccagcccataattgcggcaagggtggggttcctaccagctctatctgtacctgtcctgactgccagcctgaggcctgcacgtgccaccagcgtcagcctcaggaagagggttatggggatgctggatgtggccctccccaggccctgcaccctgcggtctgaagctgctcctgagtactaggaaagtctttcttgtcctcaagttgtagcttgggagctgtcagccttgtgatcaaggccacttgctttccacaaagcaactgccttcgtctgagttacagaagccaccgctgcgtgttcttttctgccaatgaccagtgaccggaagcaccctggctgcaggacccttgggtgctggccatgccctgttgctccctcagggccttgctcccttccccaggaggagctgctgcttcctctcactctccctgccgcccccacacttcctcccagcacctttcactccgctggcctggcctgtccccagtctgctgctgtaggtctctgagcctttcctttctacatacgtgcttctattgcagtaaacatattccctggcactaagcagtgtgcttccagctgccagcgcacaggcctcaagatggcaggagaaagtgctgggactcaaccccacggcctccttccctcctcacacctccggtccacagcttgcttcttgctcactttttgttcaaaagcctcaggcaaatcatcctccattttacatgatttgtgcttaattctcccttctatcctcccagataatggttgactttatttaagcaaaaatttcaccaagttttcagtgacagataagcagaacacctttaaaaataagatttaatgctttattgctcttgatggcaaatcaaaatatgctttagaaataaagttaatttactggaaaataggagtttttgcaccaaaccataaaattgcatttcattacatcaagagaaccccctcattgtctacaatcatgcccgcttcctttcccctcagcgcccgggacacgtgaccgagatcataccctaaattcctgatccttttgcagttgccacatactgtggcttttagtacatcataaaaaagtgcttgtcctgtggcctcagctgggaggccctggcgctggggctaaggggcccaaggcaccatccaaaggctgggaggaaagaacccaaacccaggccctcctcctgccctccagcctttgacaggcaactcatttggcatgatctgttttggtgtgtttaaaacatacatttgcatgtgtctagtgtaaagcaacaagtttgaggaaataagtggaaggagagaggaagttccagttagatggttccactagtgtctactggtaattggcaaaactatgagtgttgctaatctgggctgagggcacctctgcctgtgcaggcagctgaccaggcttggagaatgagaaagggttcccaaggacaggatgccagcgggattctttgttgcaaactgcacacagtgcaatttttgggaagcagggatggggagtgggcatgagaccgggttgttgggaccactctggggtcaggccctgggtgaggcacaggaggctgcacacaggcacttggtgggttctgccgggtcagggtgggaaggcaggagaagtgtctgtggcaggacgggaagaagcttcagtacatccctctcttgcacctctgcccactccacctgaggcgttggctccctccccctcatcctctcaccacatgcctgaggcgtaggctcccctcatcctctcaccgcatggggcatttgctcccagcctctacttccctcaaggccttctcagcagctggggctcagtggggaaggtggtctcagaaggcccctgaagcatacgtgcttttgctgggcagaaactggcaagctggcagtgctccctggcaccagtttcacgggcgcaggccccaaggggccgtgtagagggcggggtgggcatcctggcctggcctgcagtgccaggaccccacgctgtgctgctgccccgcttcctgcttcccgtcatcccgtgtcttgaccccgcccttgctgtttctctgagtaggaaacgcagcgggaggtggtccagagggaaagcggccgaccctgagggctgccctcaccctggcagctccccgttctcattagggttcctgacccaagtgtggtgacagcaggtatctgattagcaaccctgcaaacggtgaaagtatctataagaggaccacagccacaggctgcgagttaagtaagatgatccttggagcatgccacactgtcctctccagagcggtggtcagaggccctggtgggggccttggtggcaaagggagtctcccaggggagaacctgggaaggatggactcactctgctggatgggctgttccgctcctgccactggctcctggctgaggggctggccctgtgggtgactctgctcacccagtggctttggctggcggctgggagttgggttggggtgggtccgccgaactctgagcagagcctccctgagctgggtccccagggctggctcaccttgggcaagagaggtggctatggggctcccgcagagtggggtcctgcatccccaccccttccctctgcagggtcagcagcagggaggacacctgtccaggtgctctgacttgacctggccacggggcatccgcaccaactaaaggcaccatccagttgcctctggggtgagattggtctggacgtcagcccaggggtctgggcggggcaccagggtctttggcttattgaacagggaccgtggacagtaaggacagaggaagatgataccaaaggcagaaaaccaggaaggaaatcttacaggggcggggctcctctgggaggggccctcgcagcaggtttctagcgggcatgggttgggaggcagcagctggactgggacccaggactcggagtgtggccgggctccgggccaggcctccgcggggcgtcagttcccgggcacgctgaggatgaagcccgagcgattcttggtgaagtcgggctggggctggttgagccgcgtctccacggagacggtgcacttcttcccgtgcaggctgcactgtactgggttggtgacgttcacttgaaggtggcgcttctcactgcaggaaccaaaaacaccagacgggcagttagcaggcagcatgagaacagggcacctgcccggcagctcccggccaccattggctccggcgcagcctgcttcctccacaagtgccaggaggatgcctgaagggccccagagaggccgaggcaaggcgagtgtggcactagctgggcctccaaccacagcctcggcaccatggcagggcccttggctcccatgccagcgcatgggactggacagtggagggccatgtggttgaacagacgccaccaggtctctggctggggctgaggaccaagcccctgggtccttcggtgtaccagggctggggttctgactctgacactaatccatcctgcgggagacccgtgccacatgccccagtgagagagagagagagagatgtctcctgctcctggctggtccctgcctgtcacaccccggctggtggaagtgggcctgacttgggtttccccaagcgagaggctgctctcatctggagctgggccgcttggctggttgccaccctggaggctgcagaacagtgcagccggtgccccaccgggggctgcagggaaccctgtgcagcaggaagccccgctggcctgggagcacatgaaggcggcttcagccgggcgtccggccgggctccaggtcgggtgcagaggcggaagctgtgctcttcctgctggacagagcccgagcccgagcccttcctccagctcctcacacgacgctgaacatgctaagaagctgctgctggttttaaaagcagagacacttgtcgcgataggctggcaccccaatgtttgctcacacaggcagcacaatcccacgctgtacctcagcttgtgccttgtcagctctgagctgggaggggagaggagaaaggaggaagcctcctgacctcggagcctccagtcaggactggctggctctgctccgtatgccgaaagccctgggaatttttcactgctctcgggatggcgtctggggcgtgggcaggttggtcccgctttgaacgctctgctggacttacggagctgctcttagtgctgggcagtgaacgccaagctgtcgtgtccacacggccaggggaacgccagggccaaggccagcatgcgctgagcttctgcccagcctggagtcgccttcaccaggccatgagcacgtgaggcactttctaagcactggttgcccgggaggcgcaactgctcagacgccgaggcagctcaaagggctccgacgtgcggtggctccacggggtcagcgtgcccagagtaatgggtgtcactagagcacctggcccagcacacgctttctgaggacacctggtgggcgcgccccacagcaggccccaaagtttcagaggtaagtgcggggtgctcaggggctctcctcatggctgtctcccccctgctttctcacggacacaggaagagaccccggttgtcacttgtgggcattacgtatctaatacttaatgtcttgtcagctgcagctaaaacctgagcttagacagctatttttaaccagacttggacataaaaatagcagagcccagcagaggccgtgactcaggccctcttctactcttgtgggcaccagggccgctctgcagggctcatgtgcagcccttggcggcggggtccaggtggggcccctgcagccctcgtgctggaccagatgcctccaggaccaggctggtccctgagctggggtggcctccctgcctcccctctgtcaacctggtatggcgttgggtccctctcactggactcttgtcctctgggagcctccctcctgaccctggcagcggcctccccctgctcgccctcctggagggcctgtgcccttccctgtgcagggagtccagactctgccctcgcccttccctggggaactgcatgtacacagtgggttccagaatcacctggtgactcagtctgagggaatgggctctaaacaggccacgctccacgtcagctcaaaaaaattaagagacagaaaatgggaaccattagttcaccctcaccctctcgtgttcagacaatcggggcatgctcctccgtgcagggctctcctgactcccgctcagcagggtggcccctgcctccaccctccctgcttcctctgggctccgtgtatctccaggatatgctctacagccttgatgccggggttcgggctggtgggaaaatggggaggagcaaatgactgctataaaatggcacgggtgcagtggctcatgcttgtaatcccaatactctgggaggcagaggagggaggatcaattgaggccaggagttcaagaccagcctgggcaacatagcctatagcccaggagcccatcgctcctctctacaaaaaataaaaaaacaaaccaatgagcctggtgtggtggcctgtgcttgtaatcctagttccctgggaggctgaggcaggaggatcgcctgagcccgggaattcaaggctgtgatgagctatgatgatgccactgcattccagcctgggcaacagagtgagaccttgtctctaaataaataaataaatcggcacccaggatatcatcctcagggagttgttgtagaataaaaaatgcagcaggaaccactgctccagattgctgcttcccacacgggctgggctgaaaccttttcctcctgccctctgttgtccctgtcagtaggtcctgtggagtacttgctgcctgggggaggcccttcctcagggagtgtccagcagagggaagagcagaccacgctctggaaggtccaagccgatcatgcacgagtcaacagtgctcccactgccgggccagcccctcttccccacccgaggccaccactctgctgaaatgaaggttcttgaatagcaagaaggaaggcagaagttggacactggatccttctgggttgtggatgtggatgagctagctgtgggcccctttccctctccctgtcctacttctgctgtgccagccccacagctgctcagtcccctccctggtggtgggtactgtcccgggacagccagttggtcctctccttcccgttggcaattctggctttccggcattccacaccaccggcccagcccctggggcttggcggaggcagtgttcctgctagctcttctctttgggcggaggagccccagcaccgcaggagatgggaggcagtgcagagactcgcctgagtgctgagggtggcggggcctgtctctgtcccctctcggggacctgtccctctcctggaccacggatattgatctgaggcaaacatctaattcccacttccccagaacatcccccaactgaacaaaaatcagtgacacttcaggaaagaaaaggtggtatttagtggcggtccccacactgcccctcccaggactgttttctaagcccacgtgagatctctcctgatccctttgaggtcttaatacaagagccgggcctacgggtgggagagtctggattctgtcctggccttgccatgcttcctggcttcatgaccttgttcaagtcacttaaacctctgtctggcttttacaaccatcaaaccatctaccctccaggtgctccacaaggactgactccaccccgggcactgtgtcggcactggaaacatgaaacccgagctgggagccagacaggggttcttcctgagagcctgggaagccgcctgccctcgtggaatttacggtctaaggagtgatgcacgtgaggcactttgaaagatgtgaaggactgtgtgtaaaacatgtgccaatttctcgcttcgcagaaggaatttccactgctttctcagttaagtgtcaagaacctccaaaagagatggttcaagagagctatattattgaatcagattatgttctttacacattttagcatagctcacaaaaccatatgaatgtttctgttttgaatattctcttcctaaatgttttacatcctgtggggaggggcttggattctgattctgtgtttaaatcctacaagcaggccgggtgcgtagctcacacctataatccctgcactttgggaggctgaggcgggcagatcatgaggtcaggagtttgagaccagcctgaccaacatagtgaaaccccgtctctattgaaaatacgaaaattagccgggtgtggtggtgggtgcctgtagttccagctactcgggaggctgaggcaggagaattgcttgaaccagagagttggagattgcagtgccgctgcactccagcctgggcaacagagcgagactccctctcaaacaaaataaaacaaaaaacatcctacaagtgtcaagcatggtggtgcacacctgtagtcccagctactctggaggctgaggtgggaggatcacttgagcccagttcaagaccagcctaggcaacatagtgagaccctgtctctaaaaataaaattaaaaaggcggccgggtgcagttgctcacgcctgtaatcccagcaatttgggaggcagaggcaggtggatcatgaggtcaggagatcgagaccatcctggccaacatggtgaaacccagtctctactaaaaatacaaaaattagctgggtgtggtggtgcatgcctgtaatcccagctactcgggaggctgaggcaggagaatcgcttgaacctgggaggctgaggttgcagtgagccaagatcatgccactgcactccagcctgggtgacagggcaagactctgtctccaaaaataaaaaaataaaaaaaaataaacaaataaaaataaaaagccaagtatggtggctcacacctgtaatcccagcactttgggaggcggaagccggcagattgcttgagctcagaggttcaagaccagcctgggcaacatggtgaattactgtctctacaaaaaaaaaaattaaaaagtagctgggtgtggtggcatgggcctgtagtcctagctacttgggagactgaggtggaagaatcgctggagcctgggaggcggaggctgcagtgagccgagactgagccaccacactccagcctgagtgacagagcaagaccccatctttgaaaaataaaaaataaaataaaaataaaaaataaacaaccctacaagtttaatggagcattcacaccacatgtactggtctccactttcagaatgcaaggtcctggcggggaggggaggcgtcttacacagctgcatgcgtggtgctgccctgcacacaggagatgctcccaggtgctgatgggcaacactggctgggccacaggttctggacgtgctggggccgcgtaaggctgcaggcctcagtccatctgctgtgtaaatggctctctcccagtaacacaacttcatctgctcacttcatcaacttcgcacactcactgcagcctcatgaatgaggaagacaatgggcacaactggtcaagagcctcctgggatggagactcacccagtccatgaagttccttctaaacacaaagtggccagatacctgtgaaccagacctgggaaggaggtctgctccttagcagagagatactctgttttgccgccttaagtgacagttgcctgggttactacttttttccttggcacagacctgggcagccctggcctgcctgactcccagcctgtttgtgtggtgctgctgtgacgtttgggcagaagagggggttgagtgactacgtgtgttgagctcaccaccgaacaacaagggcaagaagaaccagccttctgctctgaagttcggctgagcactgcccagctgacgccatctacacactgccatcagcagataacgaagtcagaaaatgtggattgaggggccaggcgcagtggctcacgccggtaatcccagcactttgggaggccgaggtgggtggatcatgaggtcaggagatcgagaccatcctggccaacatggtgaaaccccatctctactagaaatacacaaaaaaattagccgggcatggtggtgggcacctgtagtcccagctactcgggaggctgaggcaggagaatggcgtgaacctgggaggcggagcttgtagtgagtcaagatcgtgccactgcactccagcatgggtgacagagtgagactccatctcaaaaaaaaaaaaaaagaaaatgtggattgaggttggcggctcctcagaaagttaaacattgaactgccatatcacccagcgattccactcctgggtatatacccaaaagaactgagaacagacaaaagcttatacatgaatgttcatggcagcactgtttaccaaaggtagcaacagccttgtgatgtgatgatggtgatgatgatgatgatatgatgaggtgtcatccacagttcctagctcgtatctcccataaccattgttagtcttttgttataacgttggggtgctttaggcctcagaagcctcagaagcagccctcaggaaacaaaatctctctcgctgactttctcctgcccaagtcagttctctaatctgattgtgagccctaacaccctcattcccgagggggtcctgcccaacaccttggaggaaggaatgctgcacagagaggccaggaaagatctgaatggacaggccttggtgggtttagatcagtccctttttggccaatctcatttcgacacagttgtccatgcttcaatcatggacagccaatggagtctccataaaaaactcaagaaggatgggtttggagcttctggagagctggacacatggaggctgacgggaaggcggagaagaatccagcacgtaccgggaggcatcccagtccgcgaggacagacgagcctctgcttcttgggacccttccacaccttgccctgtctgtctctttatctgctgtttatctgcatcctttagaatatccttcttaataaattggtaaatgtaaggaagtgtttccctgagttctgtgagcaaattaattgaacccaaagaggaggtcctgggaactccaactggaagctggttggtcagaagttccagagaccctgacttgcaactggtgtctaggggtggtgtgggggctggtctgagccctcaacctgtgggatctgacaccatctccaggtagatgatgtcggaattgaatcggaggacacccagctggtgaccactggtaggtgtgtggcgaaaacctccatacctttggtcacagaagtcttcttctgtgttgatgactgtggtggtggtgtgagagcagaggaaacagtttgatagagacttttcctacataaacccaaatgtgcatcagtggatgaatgaataaacaaaatgtggtacatccattcaatgaaatattattgagcaacagaaaggaataaagtattagcacatgttacaacaagatgaaccttgaaccttgaaacatgatgctaagtgaaaggtggcagacaacaggctacatattgtataactacatttatatgaaatagccagaagaggcaaagccacggaggcagaaaccagttagtggctgccaagggctgcggggagtgggggcgtggagggactgcttagagggcatagggtctccttttggggtgatgaaaatattccggaactaggtagaggtgatggtcttgtaacattgtgaatgtactaaatgtgactaataatatgttttatgttatgtgtattttaccacaataatttttttttaaaatgtggattgacctaaatgaaaaattagaatttgccttcaaaccatgttttctctcctcatctcaagtttagccaaaataattttaagactaataagagatttcttgtgctgatcctggagacagagcagagaaaggcctgggcaggagacggagtagacgcttggggtcagtgacttctttcttgtttgaacttcgccacactctggaaatccaactagagccagaattctttccttattttttaaagaaaaggaaacatcgtacagatggaggcagggcgtctccctctgagggtgcgccaagccaaaggacagctgccgagggaggctggctgcattggggagggatattttttttccctccccatcctctgttacaggatttaatggccagcaaactgtggaattcggggactttcatctcgtttcatctgtttcaagccatcattgcaggcaaatggcctttatcaaattactttccttcatttttcatttagactcttgtcttctgctcttagagaaacccgtgagtaaatgcaagacttgatctatggaatgaacaaacatgttccctgtgctacctgtgccttcgcaggccctgcacaaagtgggacaggccactcctgtccagaaggtgaatcagcccagaaaacatcccctcccatccaggcccctggtcagctgggcagtgcagggttttaggtcaaagccaaccaggaaagcgggtcctgggaggttgcaggcagccctggctcagctgggattaggagactgtcattcgccgacctgccctgcccctgcagaagccaggcaggacttgaagaaatcagtgagtcacttttcctctcaatggcattccctgtgagagtgggggtgatccaggttctaacaaatgcacttcaagggaaaatgcagtggaagtggggtgcagtgcagtcacttggtgagaacatttttctgggtgcagcaaggagtgtctgagaatattgtgaggctaatgcaatgttctctcaagtttggtaacaggatgtggtaggaggaacacagccttgcaccaagcagagacaggtgcttttcaaagtgatagtaaatgcattaagtgcttcatgagaaactctagagtcacagagacaggccgtcctccatctggatgtcactaggacataatgcatgctctctggctcacactgaggacaacagctactgactggagcatcaggagctcatgactgcagctgtttactctgtgtttcagttccttcaagaagtaaatccccctgctgatgtcaaaccacacagggaatctctttcaaaatcttgctttaggaaatgccacttctgtttatgtcagggtcgaatggacacttttaccacagtcacctataaggtgaggctatgatttcagcaaccaggccaagtccaggagtggtggcgtggtgcttcctggcatactgagtcctttctgggtctgcagctggtgaggaatggggcaaaaccatttgtatttggaaagtaaaacctttctcttgtcatgaaccaactgggtcatatctgggtgttgtcggcagccagcatgccctgagacctcacccaagcctgctgtctgcctctccacagcactgaactgacctggctcccaggcccgggggcgtgatccacactcaccctgcttgtgtccccaacaggactgccaccaccctcccagcctgggctgcccctcccccatggcactctcctcatgctgccaacacccattcttcccttccctgcccacgttctctttgcagtgactcatggagcgcccagggtggaaggggcactgtccagagaaggacaaatgcggtgaggatgacccgggcccaagctcgtggatgctagtgctttgtaggaagcacctgctgcatggaggagggtcactgaccctgggtggctggggtgggtgggcttcccagaggaggcgacacacagactgataccgcaagaataagtgggactcctgcgggagctgttttggctttgctttctcactccttaaatactgcttcatcttcggcccctttcattttatacattatttcacagtggcatcactcatgcctgtggtttcaatgacaatgatccagtccgtgtcccctctcttagcatgaggtccatgcatgtcttttcagccacttcctagacaaatccccggaatgctctgcagacagctgagtcttcacatggccaatgctgagatcatcctcttggccccctccctcaaagtgcttccctcctcccatcaagcctatgcagtgagaggtgtcgtctgcacggtcactgaggccagagagctggcaggcagccccgctcccgctccttctccactgccgacagtctctgagttctactgattgcactttttgtctgtgtcccctgccgaggcctcagcccagacccttttctctccttcctggttactgtcatagcccggactggcttctctgccttgggtctgccccagcacaggggcagactgtgtgatgtcctccacacagtcatcagagagatcttttaagggctcaaaagaccctgcggctcccctgccaatagctctgccatcgtccccagagctttcgaggaccctccaccatcggcgccaaccccagctgagctgggtgctcgtctgcaggcctctgctccatctcagcctgagcatgaggctctgctgtgctgcttccagcagcagggacagggctgatgagcctggcccttgcaagcatcttcctgtgccgaatacaattccacagacagaggatttaaaatccaagtggaggtgacaggaaagaaaggaaaacctccaggtatcagaagaaaggagggggtgtgaagacagtatgggaggaaggtcaggctggggctcagctctgggaagtgccagcctgaacaggagtcacgcccgggtccacatgcaagggaatgaggaccgaggccctgcatgtggcagggccttccgcaggctgccccgtctgtgaacaggacaccagaagaagtctgccttccagcctggcaaagtggcaaggaacctctgggtgggaaaacaaatcaacaaacaaattgtcagtaaaaaacagaaacctcacactttcctttctcttgacctcttgaaaaaagcaaatccactgcagctcaccaaaggcaaagagaaaaccttaagaatacccagagagaaaagacacgttacttgcaaaagaacatctaatgcagggagataatgaaaatacagactcttcaaagggctgaaggaaaaaaaccgtccacctagaattctatccccaaactgtcatctgagagcaagggcaaaacaaacgctttctcagacaggctggacgaggtcgctcacgcctgtaatcctagcactttgggaggccaaggtgggaggaccgctttaagccagaagtttgagaccagtgtgggtaacataatgagaccccatctctaagaaaaagaaattaaataagacaagactttttcagacaacaagtgctctgagagctggcctatcttggctgtcttgtaaagaattgctgcgagacacctcattaggaaagagactgaatctagaaggaaagagcagagcatgaggtacaatgaggagcaaataaacaggtcaccatataagcaaacccaaatacacattcactatacgaaacaataaaaatgactcatttggggggttaaaacactgttgaactaaaatcctggataacagcagcatgaaaggtggggtggtggtcccaggaaagcattcaaaggtccatgtctcatttgggaggagggtagggagactcatgaacttgaggctcccttcaggcaagcacagtgcaaaaaaattataataatgggaaacagatacagtagactgtgatgtacaactctcagagcagtagaagggagggtataaaacaaatctgatccatcagatagaaggcaggaaaggggaacaaaagtagcaaagaagaaacacgggaacaagaaggcacaaactaataatggaataaatacatttaaatatataaatgagcacagtaaacctagatgtgcaaacctctggctaaaagggatttctcagatttaatttaaaaatgcagttatatgctacttgtaacagatgccatttaaatcatgatgacagtttaggtagggaatatgatacataaatcaaatactaatcaaaagaaagctggggaaaagcattgctggagaaaaagctcattagagaccgggtgcagtggctcatgcctgtaatcccagcactttgggagggtgaggtgggagggtcacttgatcccaggagtttgaggctgtaatgggctatgattgtgccattgcactccaggccaagcaacagagtgagaccctgtctcaggaaaattaaaaaaaagttcattagataattgttttgtttatttattaaggaacagtttaccaagaagatgctctcatacatatgatttacaaagataaaataacaagtccacaatcatagtaaaagtaaaaataggctgggtgtggtagctcattcctataatcccagcaatttgggaggctgaggcagatatggactgcttgagcccagaagttcaagacccacttgggtagcagaatgagaccctgtctttacaaaaaataaaaaaaaaactagccaggtgtggtggcagacgcctatagttccagctactcgggaggctgaggtgggaagattgtttgagcctgggaggttgaggctgcagtgagctgtgattgtgccactgcactccaatctgggtgacagagcgagaccctatctcaaaaaaactcccccaaaaacaaaaaacttgggtgtatgtgtgtgtattcattacattcaacaattagagaacacacattcttctaaagtacacacagaacacatactagaccacagaagaaagttcaataacaacctgtgaattagcatcacatagaaaccatcttctgtgtctacagtgcagtaaaattagaaatcaaataaaaggagaataaaataacaatataacaatagtactatggactgaattgtgtcccctccaattccttatatggaagacctagccttcaacaccacagtattgtgagatctgggctttacagaggtcattaaggttaaatgaggtcataggagcagggccttgatctgacagaaagaagagaaaccagggtgcttgctttctctctccccaccacgtgaggactcagaaagaaggtggcagtctgcaacccttgaagagagccctcaccagaacccaaccatgctggacttttttttttttttttttttttgagacggagtctcgctctgtcgcccaggctagagggcaatggcgcgatcttggctcactgcatcctctgcctcctgggttcaagtgattctcctgcctcagcctcctgagtagctgggattacaggcatgtgccaccatgcccaggcaatttttgtatttttagtacagacggggtgtcatcatgttggccaggctggtcttgaactcctgacctcataatctgcccgccttggcctcccaaagtgctgggattccaggtgtgagccactgcacccagcaccatgctggacttttatctgggacttctagtctccagaactgtgagaaaatacatttctgttgttcaagccacccagtctatggtatcttttttttttgagacagagtcttgctctgtcacccaggctggagtacagtggtgccatctctgcttactgcaacctccgcttccctggttcaagcaattctcctgcctcagactgccgagtagctggaattaacaggcgcacaccaccacgcccagctaatttttgtatttttactagagacggaattttggtatgttggccaggctgctcttgaactcatgacctccagtggtccacctgccttggcctcccaaagtaccaggattacaggtgtgagccacctcccctggccagtctatggtatcttgttatggcagcctgagcagactaagacaaatagtcaaacagtatacagtgcttactaagtgccttacagatatcaattcacggacttactacagcacgaggtgaatttccttttcagaagaggaaatgagaaggcccaaagagcctaaggacctgcctgcccgaagtgatagagtagaggcaggatttgaacccaggcaatccaggccatagtccaagtcttaacctctatgcatcctgcccctaaaaagcacatcattagccgtggtccctgtttgctgtgtgcttctgagcagagtgatgagctgagcactttcatgtccctatcaacagctcctcgtgcagtgtctgatacaaaataggagttccataaatgtctatagaaagaatgaatttttataaaatgacatgattaagaaagcagctggggctaatgtcaacacaagacatgtcttcaactgggagacatgaggctggcctcacccatcttcacagcagggttgttaagaagtgaggcaagtgaggcggagccatcggtgggctggggttgaacacaaagggtcaggtggggtacatgtcccggcctggtatcctgctccgtgtaaggggctgtttatgtgtcaagtgtgatgaaaacatatgaagaggcactagggacactcactgttcaaggggtgccttttgggaactgaagaaccctcttgcaaagtgagtcattaccttgctttgtaaacccaaacatccctgtattagctgctgcctccccactgctaatgaagttttcagtgaaataaaaacatttggtaggatggaaaacatttggactgatgggctttggaagcacatatgcaaggttagagaagctccgggaattgtatcgataaacatgttgccatttttatgtcctgaggtttaatggagacgagcagacactgcactggctccatgcagatttctcagtaatagcttcagaaatgtgggcagatatttctttttttctttctttttttttttgagacagagtcttgctctgtcaccaggctggagtgcagtggtgcgatcgattccggctcactgcaacctccgcctcccaggttcaggcaattcccctgcctc[134 bp omitted]gcctcccaaagtatgtgggcagatatttctagtgaaatatatgggcctggagctcctcagcagcatgcctgcggagttgtaaaggggtcttagattgggaggagaaggttgaaattcactgtcatccatttatttattaagaatttactaggcactgtattaaacattttacatacttaatttcatttaatccttatcaaagctgtcattatggggcactgtcattctgttcactttatagatgagggtgcagaagcgtagaaagctcaagcaacttcttgcagctggaaggtgaggctaggacctggcccagggcaactgtctcctcaacagcatttgcgcctccattccatttagtttccaccctaaaatgctgttctagctcttgcgtggagcatagcctctgcagcatggaattctttaataccaggtgcttctgagtcagaggaaaaggcactttgaacctcctgtaacgatgctgaggtttggacattctgacccagcccctgaccccctccctgcacaggcactttcaccacttgtaagtttttcttgctgggcatagcgcctttcactccttggcctttgtctggccagaagacattgatgtttccaggcatagatgattccaggctgctaaagaaagaggcactctcctggtgcttggagaatttgtatgcattttttactattctccagcacacatctttgtcttgactttccagctgcagtccctgaggagtactccatggagactcctggtttccgtttttgtcaaccaaaagcttcgtatgctttgtgcctcagcaggcttcccctggcaaggtgggccaggcagggactcggtgcactggaggtggcctgatggctcccgggagaggcctggcgacccctgcgtcggttctctcttttgcttcccctccaccaacatcagacttggaggtgttgaggaagctccattttgctttgtctatttggaatctgtactctttaaaggctgcattcctctgaccctgccaaaatgcccaaattaatactttatgccaggcataatgaaacctttcaaaaccagagttaaagaacaaaactatacccacagctccctcaagtatgagggaagaaaaaaaaaaaaaaagaaacagaataccaccaaaccaaaccaaagccccatcacaaaacaaatgagacagcagttgtgagcagagggctggggccacctcagtgggacgcctgggccagcatctgaccctcaagagggaagtgggctctggagccttgagaccctcccacatcaatcagaggacatctgtcctttcctccccttctcttcacgtctcttccttcttctacctcccctactctccttaaacttctctcgctcactctgtttttttttttggaaacagggtcttgctgctctgttgctcaggctggagtgttgtggcatgatcatagttcactgcagcctcaaacgcccgagctcaagcaatccttccatttcagccacctgagatgctgggactacaggtgtgtgctaccatgcctggctaattttttaaatttcctgtagagatggggtctcactaggttgcccagcctggtcttgcccaggctggtttggcctcccaaagtgctgagattacaggccagagcaaccatatccagctccccccgcgaacttctcatctcttgatgctcttgctctaatgtctgtagggctttattttacatgtttgaaagaggttttcgcctttgctgtattgaacttttttttttttttggacatctttgctatttcctgcttatatttctgttctcctctcttgacacttctattaacagcatttccaaagttagcaccatctgtgaacaccaatgtttattttctattcacatcattaatgaaggtgctaaataagactggactgaacatgcaccagcacccacaccttcctctgaacagacgatttttagtggtttgtcgggaacgccattatatatttgcttattcagctcaccattatcaagaagcatttaaatttatatttgtgtgtagctgtgggtcactggatagaggagttaacaggatcccagtccctgccacctgagaatcgaacattgaaagcacttagcacctacacacaaacacactggggacatatatattaaaaagagagctggctgggtgtggcagctcatgtctgtaatcccagcactttgggaggccgaggtgggcggatcacctgaggtcaggtgttcgagaccagacggaccaacatggtgaaaccccatctctactaaaaatacaaaattagccaggtgtggtggtgcatgcctgtaatcccagctacttgggaggctgaggcaggcgaatcacttgaacccaggaggcagaggttgcagtgagcagagatggcgccactgccttccagcctgggcgacaagagtgaaactcttatctcataaaaaaaaaaaaaagagccatcatgaaacatctgcatcttctgggatgcaagataaataataaaaaggcctcagttctcaaaaaagctcagagcctggggaaggaggcttcctgagctactgtatcaggtgcaacagagtcagcatcacagaaggtctagagggcactaagcaggcccagggtggagggaggtgcccaggacttctgcctgctccctgcaagggtgtggcctcttaggctgtgtcctggctttgcgtggctttgctatgcacatgcatcactggaataaactaggctctcagcactgggtccacagcatgtcaggatttctcatcctcgtgctactccccacagatagggatgaagacagagccactgaacagggtgccaagggagacagcctggtgtaccagggctgaaggtgactcacctgctcagccagtgtctctccttcctttaataacgtccctcaagctctacctgtcctttctccctgaagcctaactgggcttctccagccacagtggtctccaagaccctacagacaagaaggcgatgagctgccctttggaggatgaggaggacttgacaatgagttcaagatgagtgggggctacatttcaggcaccttgaagcctggccacacccagccaaggattcttgaagacagaaaatagataatactttgttttcttcagtgtgcttaccactaactgaaattgacttgtttgatacttagttggttaactgtccgtctcctatagcttctatcccctgcccaaaggtaagctccatgggaagggggaccttgtctgtatcccccgtacctaaaagagggtgtggtatacagtaggtgcttaataaagagccaatacatgaaattgatagagataaactaggaggtatggcagatagactgttgactgatgggggcattttgaggtaggatgaccaattaggaaactgtaagtcaaggcagaaagagctgtgatcatgagagggcaagagtggggtcccgctggagagacgcttaggagtgagaacgtggcgactggctgaatgtgggtgataagagggagactctaccatgtcttcaggttttgagctcatgtgatggagaaggaggtggaaagagagaatgagtttgttttttggacagtgttgagtttgacttcctctggaaaaggatgcaaagggtttcactatataccatgtagacccaggagtacacagggctcagtgctctctctcccttaaaggaatagatgtaatccagcaaggtagatcatatgtcaaaacagtttatcatgtatcaaaattgtttcacaaaacctatttttgtaagaaaattctattataaaatcagcacttacaatattacagtgatgctgtgctatattaagtgacagcaaataaagtctagaatttgaaaatttagagttgaaatggtaagcctgcccgcacagctgtgtctcagcaacctggctgtcattctcacccaccccaaacgccttaagatttctttctttcttttttttttttttgtagacaggatcttgctctgttgcccaggctggagtatagggtgtgagcatggctcactgcagccttctgggactacaggcatacaccaccatgctaattaaaaaaatttttttggccgggcatggtggctcatgtctgtaatcccagcactttgggaggttgaggcgggtagatcatgaggtcaggagttcaagaccagcctggccaagatagtgaaactccgtctctactaaaaatacaaaaattggccaggcatagtggcatgtgcctgtaatcctagttactcgggaggctgaggcagggagctgcttaaatccacaggtagagattgtagt[131 bp omitted]actcctgggctcaagccatccttccacactggcttcccgaagtgctgggattacaggtgtaagccaccgcggatgcccaagatttctatctttttattcaatgttagtcttttatttaaaaaatatttttcacactattatttccagcaatctttatctgaaaatgtccaaactttaaaaaacactattcttagaagcaatagtgcaaattataaaggggaaaggagggaaagtctaatccttgctttgcaaatagcaggtcacactctccaaaatcgtggtgacctataaaaatttggaaactagtcaatgtccaacaacaatgggtaaattatagttagtttgaatcacgatgaggggctgttagtacatcacattgcttgctgagcttgaaaaaagggatttttctcagatactgatcgttcttttagaagtttagttataacacatccgggagtcagacattccagctggcagcagcagcaggaaagagatgcggacaggggccttccaggttccctgtatttctaggaatgttgcttaatcaaaagaggagacaatggaggcatagtgggaagaatacaaggtttggaatcaatagtttagggttcaaatctagctgtctggctctgggcagttacttaatccttttaaactcagtttccttaactgggataatgaacagggataatgttcttttttctagagagttaaaggagaaaatatatgcacagtggctagtgccatgcctggcatcgagtaagtgccccattaatgtttgttaatggagtaagcgcttgaatggaggaggctgttagagtggaatgctggttagacgaatgaaaccagggctgaaaggacctttgcccagcctctcaaggcctctgtccctgaccacggatattcccctaagaagcaactatgccaccttccagggcaaaaaggcttgtcgattccagaaggactttttaacttgttattcagtatttttaaattccctcctcctgtcttttctttgacatagagtctcgcccagtcccccagccatggcctactgcagtcttcacctcctggtgaagtcatcttcctgccttagcctcctatatagctgggaccacaagtatgtgcctccatgcccggctaattttttgattttttgtagagacagggtctcgctttgttgcccaggcttgtcttaaactcctaggctcaagcaatcctcttgcctcagcctcccaaagtgttggtattacaggtgtgagccactgtgcccagccttaaatcccatttttaaggacaaaggataatgctttcttcttggggctgacgacatagttctttttggatattttccatcacactgtcactgaaccttgctcccatccaggcaactataatccacagtgaagaatatttgattaagtagcaggtggtgggggatttttgttctgaggggaattcaaagaagttaaaacagaggcagctatctcataaaccaagcccagaacacggagatgaaaagaaacaaattgcccactttctaccacctgtttgagaacagaaagatttacactcacttatgtcagctaaaaaaatgtacccttgtctcattgcggtaaaagagcctccactgctcagatgcttctgatggaaagtctaccccctgctccgatacacactttcatgctggtaatgacagaggcaaagcaggcctttctatcaatatgttctgcacacttcctagcagctttgctttttctattctgcatttgctattttaagcgagtacataatgcatcaattttcagactcttactcaatgccattgctacagaactgagaactcagtaatcttgtcaggcagagcagaacaatattccaacagatgaaacattccatgcagccttatttcccttttcctgggatggggcatctatttctggcctataatgagagatgaaccagtggccatggtccagtgcctcttgccctggaatcccacatcacagaaaccactcaccatgctgctgctggtagacacatgaaaggccctgtgggggtctcaagttcatttgactgctctcttattttttattttaagttcccagaaatgggttgttttgatccaggctggagcttgctggctgggaaagtgtgggttctctcaggccacatttccccttttcctgcctgccatgaagagtccccattttctctggaatcaccaattggatttgagagccccagaggaacctttgtctccctgcccccagtctcgtagaagatttaaatgtgaagtgtctccacatggcttcttgccaaatttggcttgcccttgagcgcagacacacttccaatagaaggccaattgcatctgatacctcagtgggcagtttaggcaaatttccctgctgtgtgtgtttacagctttagtggcttctaatacaggccttatttactgcctgcattgttacctgggagagagagagcagaatggatctgctgctacttgctacaccatttggcttgtaagtggattaaatagacacattttcccaagatttactccacatacctggctggtgtaaatgggctgggccacttccaccatcctctccagttcctgctccttttatcttatatccattaacaatggcacaacaaattagcgtgggtgcatagtgattccattggaaggtgaacaattcaataaaaacgacaccactgctttctaaagaactaatttatagcatcgaaggattcagctatcccaatggggaccttgaattactggcccaactttattggcatgaaaacaatcaaaccaaatacattcttcctctggagctggaagtcagacaccctgggtaatatttaggtcactgctgcccaggcaaatctgaaaaatggtttgtgccctgattaggcagttacacatttgttttaaatgactgtcacaggatgggatccggaggcattttaaggcaaagagaagtcatatgagcagtactgaaacaatctgaagtgggctgaagcaaacagcctctttgtctagcctcaagtgtatcagtgtcagctttacagctgaaatggaatctttgggtttggtgagtgtgtccccacttcctcttgtctgtctctgggagcccatagagcaaagattctcaaccttgattgcacgttaagcttatgaaaaatactggccctagcagtggtcaggctccaaccccagagactctgcttcaattggtctgcctgtggacccctgaatgtcgcgttgttaaagctccctgggtgattttcctgtgcaccaccgctttaaaccgtttaagcatcaccctccctgggaacgaccggaagaagagctggccccgctttgcttcagataaatgctccaattagctgcctgggaactggcctagcacatgataggattccccttacatacaatttaattgatttatcacactttttattatgacaatttttaaacatatactagaaagaagaattacaagaatgatttggaacaacattctagaagtgcctgtgaaggagcggctgagcccccaagggtcacagagctcagaggaggatgtggagatgggcacccctcctgccaccccggctctccctctggacagcacctggcccgccactctgccatcaccctctggacagcacctggcccgccactctgccatcaccctctggacagcacctggcccgccactctgccatcaccctctggacagcacctggcctgccactctgccatcaccctctggacagcacctggcctgccactctgtcatcaccctctggacagcacctggtccaccactccgccatcaccctctttcttgtccccttctcatttctttcgtcaacaaacattggctaaagcctgtgtgtcagcccttgtggaacagtgatgcataagccaggtcttgctcctgccctcatggagctcagagcctggtgtggaagactcttgtaaacatgagttgcacactcattactgtttattcataattctgcgaagagctctcgcggtaaaagtacagactgcaatggaatcgtgacgggaaacctaatctatcttatttactctcgggggagtcagtgaacactttcttgaagaagtgatattaaaaacatttgattttaaagagtgaataagaaatgcacatggtatgatattcacaggtcccaaagcatttagagggaaagcgtgtttccttccacccctatcacctggcctcggtttccctcctcatgagcaaccacagtcccacttagggtgtatcagtcaacactaagactggcacacactaagagggtatcggctagaatatgagccaatctgatgtttgacgccactgccactagagctgctatgttgctccaggacaaagagggttctgggttagggccattactgtggccaaatccccagcactcttcatcaccaggtgaccgtgaatgctaacagcagcacattttgctcacagaatcccctccccccgaataacgacttcaactctcagaggtcctggaaattctgctttcggcctcgcaatgccatcgagctgcagaactcggcggccgacaggttctctgcggcccgggtaggggatgtgcgccccgcctcgctgcagggaaggccgagcaagccaggccaagagggcactggacgtcgagtctcacctccttttcctcccgtctcctccctctcaccaagtgacaccgctccctctcaaacggaaggaaggggaagaggtccgtggggaatctcttgggtccttaaagggggcggctgtcatgtctcctagctctgctatgcgcggtacaggccggctagaggccagcgaggccgcccaggtgagggaagcaagttcctgtgcggcgcttcagcccggcaccgcttttggaaacactggtttcatgccaggcactgggcaggccgggtgggggtggcggcgaggcctgtcctcgcggccccgggcacctgcagcgggagcggagcgcaggaagggcggctgccggggaatccggggcgacaaaggaaaggcgggagggggaggacgcagggaagcagggaggaggggaggcggaggagacaaagggaatctgcacccgccgggtgggctctggcggcggcggcgggggcggaggctgcggcttcgagcgcgacgcggtcgccaaggcaacgccggccccagcgcccgcggctgaaacgaagccgctgcccgagcccgagcgccagcgcacacgccctccttgcagccccccgcagccccggccggccgcgcttctccgcctcgccgccgacagcccctcccagcccgcctgcccgccctccttccggctgtttttgtttgtctgtctttcccgagaaggtgatgatttggggcttagatcatctgctggcatattgatgagctcactgcgttgctgaaaaggaaggggatggggacttgggtcagctaagggtacaggatcaatataagacaaaaacattaagaatataagacaaaaacattgaacaatggagatgtgggtaaacagcaggctttttttttttaaaaaaaaaaaccagggcgatgtcttagccagaaatagttaagaagggaggagaaagggctacccccgcagccatgtgaaataggattagtggaaaccctgaagactcaggcccacaggagccatactgcagcagtttgctttacgtgacacttttcctgctcagattcctgctccagaaaaagaaaatcaatctgtgcacctttttctttttcttattcaaagcccaaactcatggtatcatctcttaaactgtatttcagcacgaacagggaaaggctcatgagactgtactctgtgagggtggaaaccggtctgaaccatccctgtaactgctgagccccgggacctgccgcacactagctgagggtgatggaccctgccgctgtgcacaaagtccacacagaggacttcccgaggtcagcctccggaaagcaatagcgactgggcccagaaacatcctgttagcacgaatgccttgctatgaagtcacacaaagagccaaggggtgtggctggggaggttttgaaaactcagcgaatagcaaaacgggggcaggaacataggtctttttatccatcaggcaaagtcccacctttatgacatatctgtcctgggtctggagcaccatgctttgtgagattataatagagaggcatgtcgatgaataataggcgtgtgacaggttggtgtgggctggcagggagctgcctcccgactgccctgctcgcgctgctgtggggctcccccgatacaggtcatgggtctgactggagtgccatttcctaaccactcttctgttcatctagacatgatgctacgtccatcctaagagtcatatgtgttctttggttatcctagaagccactgtggtatcccagggccttgacacagccactgacagaaaaatgatgaataaaaataatacgcgtgaactgctgttattcctgcattccagaattcaaactgcaccatattcaaaggtgactgacaaagttcatcttctttgcaggcggtattgggaatggcagggggtggaaatcaatcagggaatggtaggactcagctgctgagaacatagggcggggaatcgcgcccctttgttcagcaaaatctagagataacacacaatgtttccattggcttacccaaaagatcagacctcagtttggaaggttagaagtctagaactgggccttgagaaaagatccgaccttgagttcagctttaagcaagaacacatctaaaatcttctggccagcaggctgtctactgatttcctaaagacccctccctcagggccagatggcctgcctccctccgctgcctactccagtattcttccatcctgaaccatgacaaccaacctactccttagaaacacacctaaaatagggaagagaaggctcaaaaaacgcatattgtctctcatagcactcatgagtgctatgatagtgaagagtaaagcagtctttctgtagaggcagacttcatgtgatgaaggcctgtaaattcccgcataatcaggaacaaactgaaaagaacagtgaggaggttaaggaggaattttcagttcctcatacaaattgctcctgtgtttagtagccatagcgtcaaggaatatttaaatatagatgctagtgaaattcatgatcaataatttaaaatgtttcgggaaaacattaatttgctgagatgtgggtggtgagtacttcttggtccatagaaccctagccagccaacctggattaaataaataaatctcagggccaggtgcggtggcgcacgcccataatctcagcactttgggaggccaaggcaggcagatcatgaagtcaggagttcaagaccagcctgactaacatggtgaaaactcttctctactaaaaataaaaaaattaggccaggcgcggtggctcacgcctgtaatccccgcactttgggaggccgaggtgggggaatcatgaagtcagaagttcaagaccagcctggccaagatggtgaaaccctgtctctaccaaaaatacaaaaattagccaggtgcagtggcaggcgcctgtaatcccagctactcaggaggctgaggcaggagaattgcttgaacccagcgggcagaag[138 bp omitted]ttacatatcctctaggagcaaataattaaaattaatcaagcaaaacattaactaaaaatgatagaggtatgaaataaattctcttcatggattatgacataatttgctatccctgcttccatctcaccactaaaggcctgatgctgtggcctaatgctgagttgaaaccacagagttcagggttataatgaaagccttttcaccaaaaatgggtcccccattggtggtcagaatgaaagaattttgtcccaaactactctagtttcttgaaggccttaagttctagctgctgacttacaatgagttaaagcattatagtggctggaagggatgcatagtgaacatattaggaagacatgatgcactgtttcctaaatagacagcagagttcccaggggatgaggcacagagcactgagaggtgatgctaaggtggggagggactggaggaggctaggatggcctggcacaaagcaggagggtgagctaaggggcagtatgaggaccctaatgacatgaagaacacggaaaaacgagtggggtagaggagtcacacagccagcttttgctcattacccactgaggagggccagtgctgcctgtggactccattaggagcatcatgtggctgtcag[136 bp omitted]ctgcctcagcctcccgagtagctgggactacaggtgcctgccaccatgcccggctagttttttgtattttagtagagacggggtttcacc[134 bp omitted]ctgcctttgcctgcctaccacatgggaggaaagaggatcaggtaggactcagggcttgccagtggacagcaagagaaggaagggaaaagagatgggaaggcaggtgggggaggggaaagagaagaaaggtatttagcacaggggtgggctttggctctgacccaacttccttttacagacaagaaaccaggcccaaagaggttatgaattgtcaagagcacttaggggtggaagtgaaactctcaccttgggcttcacatttccgattcagtgttcattcatcgagtccatgagagaaaaggaaagggcagaagtgcgaaatgtcacgaatagcgaaagagcatgatgcaaatgagaaacagaaaagctctccacaggagacttagaagactacaaaaatcattccattcagtctcatgacaaaacagtgcccgaggagctttacaatcgagtgccagtcctagcctgggcaacatggagaaaccctatctctacaaaagattacccaggcatggtggtgtgcacttatagtcccagctacttaggaggctgagtccctgagcctgggaagttgaggctgcagtgaacggtgattgtaccactgcactccagcctgggcaacagaaaaagaccctgtctcaaaaaaaaaaaaaaaaaaaaaagagtgccaaccctggagtgagagtggtcggggcaaatcccatcttctcccaacaaccagtaagccgtggggcaaacttcttaacctctccaagcctcagtttcctcagccatgaaatggggatgacgatagtattattttcatacagactttgtgaagatcaaaagataatgatccatggcaaagagttctctcagcacagtgcctggagcacagtgccgtgcgtaatcagcatgtgctgctgctattatgattgccacagagctgctacaaccagggtaaactagttttcttacaagaaaaatggaataaaaaagttgttggtgcttttctatgtttgggaaagcatatctgttttctctggggctgaatgaatatatgcatcgttttgaatttcccacagtaaaaaaagcatcattttgcttttgtctttggtggagcatgcttccttccgacgtcaactcactcttccctctattggtgagaaagtctcagtctcagtcttagtttcacaactaaaacactctctgcgctaacaagctcaggcgtaggatggaaaaaatgaacttacatttcattactttttctttttttttctttggacagggtcacgctctgtcacccaggctggagtgcggtggcaccatcatagctcactgcagcctcaaacttctgggttcaagcaatcctcctgtgtcagcctccagagtagctgggaccacacaggtgggtgccatcatgcctgattaattctttttttttttttttttttgagacagtctcgctcttttgctcaggctggagtgcagtggcatgatctcggctcactgcaacctccgcctctgggttcaagcgattctcctgcctcagcctcctgagtagctgggattacaggtgcccaccaccatgcctggctgatttttgtatttttagtagagatggggtttcaccatgttggttaggctggtcttgaactcctgaccttgtgattcacccaccttggcctcccaaagtgctgggattacaatcgtgagccactgcgcctggccttgactaattcttttaatttttagtagagataaggtctcgctatgttgcccaggttggtcttaaactcctgggctcaagcagtcctcctgcactggcctcccaaagtgctaggattataggcatgagccaccacacctagcctacatctcgttacttttgttttccttaggaagtcaactgtatttggattatagctgaattaggaattctcaatctgcaagcattcaggggccaacatacttttcttaccatctgtcaaatgggcaccgttagcttcaatcattcataggagtggggaactacaggctcctggtaggatttatttggctgtcagttgatagtcctctgaccactgctccaacggtttcaagacaaacctcccctctctccttccccacgtggatttctgtggctatctcactgagagacctgatcctgaagagttttacattcctggctattttaagcctcactaactgttcaaatgaggtcgccacatggcatgcagctgtgggaagcagctgctgtggtttgatttctagtcagtatgtcttgacatttcttatcaagtgatttctaaaattccttgggttttttttttttcaggtaataaccaagaacttttttttttcttgggatataataaggtgtgacatcagagttgtgcatctgataacctgctcctcgctggggacagttccagaaccctgctagacttgatcttagccaaaaggccgagaagcgatcagaaccctgctagaaaggaacatttatttcaactttcaggacccaactctctctgccccagaaatatcagttctggggccgagagacactgcagcggccctccctgcagtttctaattggagcccatcctggagtctcagatgccacagaagaaagtagagagaactgggcagcttgctgggctccctggcgctaccttcagtgacaatagctaacatggaggagaggcagggtcactcagcccgaggagaaactggacctcccaactccccacctacctgcccttctcgctaggtcattcagctatttgtctcctagttcaccctcatacacctgtttgccacgatggttttgcctttaggcttttgcacacgctattccccacctggaagactcttggtctcttttccagatcaacttctatttgtcattttttcctcaatattggcatcacttttaggagcctttccgatcttccaagaaaggtttaactgcccctttgacgtatatcccctattaatgtacttaacacattgcattgtaatcccgtctactcatctggttcccccaccagattgtaaaccctgggcagggtctgggttctgttcactgttttatccccacttctggctcagcacataatagctcctctgtaaatatcagctctatattgtttcgaactcaacaagaactccctctcttcctttccctccaatatatttcttagattacatcaaattatttgcccttcaatagcctctaagtcttctattttaacgtatcaaatatctattcaaataaagtcctttgtcagttatgagtttgaaaaaatcttcaagtgtgcatatatgtatgaaaatgtggcactacagactcctagatggtgtctgtgcctaagattaatacctaaatacaaagtgaacatcttacccggataactgaaaggagctagagactctttatctagatcttggtacttcctcttcataaagccttcttttttttttttttgtgggctggtaagtatggacccctattttcaaggtatagttattattttttgagacagaatcttgctgtgttgcccaggctggggtgcaggtgcacaatcatggctcactgcagccccgacctcctgagctccagcagttctcccgcttcagcttcccaaagtgctgggactagaggcgtgagctaccgtgcccagccaaggcatagttattcttgacaaggaggtagaataggtttccaaccatgaaacatcttccatggaccatctggaactgtttttcattttctttcaagagaatccttcttacagtagagaggaagtttacagttacataaaatctccactaacattcctcctccccagtcccaaccttctgcctaagcagataggaactaacaccaagagcagcaattatcagccatcccatacagtgctgcttggtttctctacaaacacttttcgtaagaccacagtggggtctttccccggcccgccatcaccagtgaagggggacagcacatgcctctcggaactgcaaggcaggatttggcctgggatccaactttctgctttaaaaatggccacatgaacaaggtcaccatccagagaggggacttcagaagaacaaggaaggcatgtgaagctgtgcctggcgctgccaaacccaccctgcatgctggcgagaggactggttgatggcagctaaccacagtaaggaggagtccatgtggctgtccaaggagtgtccagcctgttgaggcactgccaggccctgtggactgtaagccaaggatgtgctttctgttctcactaactttaaattctagagatatcctgacagaggggcagaagcaagacatttcctgcgcttgtcaaagctacataaaagtagccaggtttggtggctcacacctataatcctagcactttggaaggctgagatgggaggatcgcttgagcccaggagtttcagaccggcctgggcaacatagtgagaccccgtctatactaaaaataagataaaaaaaatagctgggtatggtggtatgtgcctgtagtcccagctactcaggaggctgaggtgggaggactgcttaagcccaggagatcaagtctgtagtgagctgtgactgtgctactgcattccagcctgggcaacaaagagagactctataaaaataaaacaaaacaataaaagctacataaaagcaaaacaacttttttttttttttttttgaggcagagtcttgctctgtcgcccaggctagactgcagtggcacgatcttggctcattgcaatctctgcctctcgggttcaagcaattctcctgcctcagcctcctgagtagctggaattacaggcgcccgccaccaggcctggctaatttttgtatttttcttacagacagggtttcacca[136 bp omitted]tctaccccacttaaggcttgccctcttctgccccactgggccagtggttttggggaagaaggtatccagtaccttgatcagaggcgatgtctagcctcctctgccctttggagagctggtagcaaggcactgaggaattactgctttgcaggtgggagagggtgagatgggtaggaagtgcatggcagagctgggaagctggctcctcagaactgggaagttgaaagaagcagagccagctcttgagtagaacttaggggtgtgtatatgtgtgtgtgcgtatgtgtgtgtgtgtgtatgtgtgtcgggggaattactgggaagggtagtgtgtgatgctgaatatgccctcccacccccaaatatccacatcctaatccctggaacctgtgaatgttaccgtacgtggcaaaaaggcctgcagatgggattatgtaaggctgctgagatggggagattatcctggattatccaggtggaccctagatacaatcacaagtattcttttaaaagagaggcagagggagatctgacacagacaggaggaggaggaggaggcagtgtgatcctggaggcacagatcagggtgaagcagtcacaaaccaaggagtgccggcagctcccagaggccggaggggtggaggagtggattctccctgagagcctccagagggaacaggccctgcccaacgccctcgttctggcccagtgaaatgaatgtggactgctggccttaataactgtgagaaaaaaacatgtctgtggtttaaagccaccaaatctgtggtaatttgttacagcggcaataggaaactgacatagatcggtagatggtgtcctcggatgagacttctggtttacttcctgtaggcattagatggtgggactcctaagtgagaagaacaagtgttgcacatcattacatgcaatgtgcaggagcagtatcaaaattctgcatgtgcgcgtgcacacacacacacagcccaacccacccctcacttggatctgaatctgtgtctgttgttaactagcttgtacttcaacagggagctgtgaattgagcaggaggatcatgagacaagctgccccaggtagtctggcagggtctcagaaggcatcacagaacatagcagaggctatagcaggaagcaggtgaggtgtccctccagagacgtgagctgcctggacagagaggagggaagaaacccaccagaaaaggggcgggtggggagggcaggacctgttttgcagttgtaagtttctcccttaagaagaatacagagtaagggatgctagacccttttctgtttcatctgaaaacactttccacaggggtaaactctataatcgtgtgtgtgtgtgtctctaatgcaggggcaatgagctgctgggtgtgctttgtggatgtggccaggatgggctcagggggtgctgctttcaggtgggtgagactcacatggacatatgtgggtgggcaggtgccttttgcttaaggaatggcatcaggcccaggatgctaatgtgtttctatgggctgtctgagagaagacagggaaggggcacaggcggtgagagatttcccggatgagacatgaacactcctctccacgatcatggctgccttccaagaggctctccagggacagcgctcctcaccgtgggggaggccccgtgctgactcccaacgcgtaaacaaacacggggagccaggcagtcttcccactgtacctgggctccacaacctcaaaggctcccagctgtatctccacttgaacaatagcgttttaaactccttggttcattaccagtctgcatcacctattcagcattcacaaggtatacagcactagaggaggtttcgtggagctctgtggtaaaagtagatggcagagtctcagttctccagggacaatgagacaaatataaattaaaaaacataggtgacagttatctaaggcatgtgacaccaaggacaggcaaggagcccgatctgtgttcatcgagccgctccattacactctgtctgtggtcttgggaaaatcacagaacctctctaagcctttttgtccatctataaaataggcttaatacatttaaaaatggcttagaagattttgagaattaaatgagataatgtacgtgaaagccctttaaaactataataattgcatctcaacaaatgctgtaatgtagaacatagggaaatattttaaaattacatgatgagaagagaaaaaattacagactaagtgctagtctaattccaagaatataataatttcattgtggtgcatcaggacactctgggacaagaatgaaagacatcattcaagacaaaagaaaggcttagtgcagtagctcacgcctgtaatccctgcactttgggaggccgaggtgggaggatcacttgagtccaggagtttgagatcagcctgggctacatggtgaaaccccatcactatatgaaatgcaaaaatcagccaggtgtggtggtgcatgcctgtagtcccagctacttgggaggctgaggcgggaggatcttttgagcctaggagtttgaggttgtagtgagctatgatgatgccactgcaccccagcctgggcaacagagtgagaccctgttgctaaaaataattttttttttttaataaaagagtatctcaccattgagtataattgacattggtttctgtctgctcccttcttttagttctctgtcctcactccctttggagaactgatcctccctcactgcaactcaccattgagtataattgacattggtttctgtctgctcccttcttttagttctctgtcctcactccctttggagaactgatcctccctcactgcaacccagggtggtgctgcccagcataggccgacactccccagccttgaggatgggcatgtgatctaccaatcccaggacctgctccctctcctccatgccttggcctgggtacagggcatgagaaccaaattgggccaatcagagacttccgttgggattcatatattttgaagtcagataggctttctctttctttcaggatgctaagctgacataatggaagtctggagctgcctgtgaccaaggtttcccctgtgtagaagcctactgtcggaaaaaatgaggccagcacacagagactgagaggagtggagaaagagagctgggttgggaggagaagaaaaggatcttgatggtgatcacgtccttggttctagtgcttaaagtccccagggtcctgcaactctctgagttccttctaggacattcaattttgggattaaattggtcacttcatcagaaagagttctgatttatatagtaagcttactctgcaataccaaataaaacttgatggaaggcaaataagaatgttgttggaaaaagattctataaaggccattgcttttcctgaaaaaatggcatcagctctgcattcagacattaatccccaattttctaaacctggctcaaggcattaaccttttgtgtgcatcaaacaaaaatggccatgtgcatgcataatgatggatagcggagaagcattcagtgaaggcttggctagattattctaacacctgaaagcatgatcagcatggggaagtgcattcaaaatatatacaggcaatcatgctgaaatgtagagaaaagtgattgggacaacatttaagcttctagagtattatgtgtcactttttatgttcaatattgtttgcttacagagcaggaaaatttcatgtctcaacactagtatcaggaatcatacaatggcactcactcttaatggctacatcatcatctggctgcaaaccaccatgaccaagtagccaatctgttgggaagtggcagctaatcctttgtgctacaggataaggacattctcaaggtcctgcactgtgccatccctggctccaatgtggctgctgagaattcagctgacaatttccaatttaagcggtgagaagtcagttctttaaaacaagtatcagaccaaggaaggataaaaacagccccctctgtgaattattttctgatttgcacctttcttttacctttcaaccagaaatgatctgctttcttttgaacttctacacaagtttatatctgccgcctcaagcaggcttactcaatgacaccaattcagaaattaaaatattctttgtagcagaataaacagtgtagtgtcaacgtctcatggtgacccacggccttaaaagaggtgcccttagtcgggcgaatattaaaagtagaagaaggggccggacacagtg[168 bp omitted]aggcaggagaatggcgtgaacctgggaggcggagcttggagtaagccgagattgccactgcactccagcctgggcgacagagtgagactccgtctcaaaaaaaaaaaaaaaaaaaaccaaacgagtgcacgaggctgatatgctcattttaccacagcagggctgaggccctccactcccattgtttggtgcaaaacaactctatttggctttatctacactaaggttattttgtttggtggttacaaaatgaatgacagcaggtcctcttcaagaagtcagacttgatcatcccatcttacttccctgggtttttcaaatcattgaattctgtcaatagttggttttctgccaactattgaataagatcatgatggctttatgacactctctcacatggctttcaaggcacagcgtgttctggtcttcctactcttttaccattccttttgtctcctctaccctcttcttccattcgcaggacttctctatatattttttagatctatggcaaaatgaaactttattttgtaaattgatactcaggtaattccatatgctgataactcccaaatctatacctctagcccattttaattccaaaccttatattcagctgcctcttagatatttgcccttggataagagacagctgggttcatggccacccatcacccaagccagaagcctgagggccctccatgatgtcacctccttcccactccacagcaatccatcaccaaatcctgaagattttacctccaaaacctgtttcaaacccaccttctcttctttcctcccttactacacttcactactcagactcatcagatctcacctgaagcattttaacagctgctgcctgccacccactcttcaagctgcaaccagaatgatcttactaaagcacacgtctctaagccataaatctgatttcctgcttgaaactctcttttagctcctcaattctctcacgaaaaagaccaagctcctctgggtgtctctgtgatccgctgacctctccagctcccaggcctcctgctccttcccagctctccaggctccagccctactccactgttttcagttccaccatgtgctgagctctctgctccctcctggctttcatacttgctcttccattggataacacacactttcttctttgcccgtaccctatttgaagttaccctaaaaaaatatgaagtgttacaaatatttattataaagatgctcatcatagcataaattaaaattaaaaatgggaaattatcaaaatgcccaataaacaaaaatttttaaatgactgcataaagttttctgttaataggaaattacttgtagtatattaaatgagaaaatcaacttgtgaaacctgctttctatcatgacttcatagctacttaaataggatagtaatagtaatttctgcacggcaaaattatagctgacttaaattttttctttataaagtaattttttaaagttttccaacatttccccatccatatgcaataattacttttattacatttttaaaattaattaattaatttagagatggggtctctctctgtcaccaaggctggagtgccgtggtgtgatcatagctcactgcagcattgaatttctgggctcaagtgattctcctgcctcatcctcctgagtatctggaactacaggcatgtgccaccatacccacctaattttttaattttttatttttatagagataaggtcttgctatgttgcccaggctggtcttgaagtcctggcctcaagtgattctcccatctcagcttcataaagtgttgggtttacaggtatgagccactgcgcccagctggaaaaatatattttaaaagaagaacacccctaagcaaggtaatgagggcacatatagacacacagcaaagattctatttctcaaggaggaatgttttatttggaaagtttaaatccttaatgggtatgagatctagaggcttatcagtgagtcctataataatctgttgcaaagggcgaagtacaaaaaacagctgaagagtgcggcggaagcttctgctgatgtttctctgacaaatgctggggctaatattaattccttgtttttgggatgtgtgcttccattactgaagaaatccccccctttttctctttacaccccgtagatgtgagaccagctggagggccacaagaaggaatggaattgagtgagcgaagtacagttaaataaatcttaaaaacccccagctgctgtgcttcagtcaacagggaacaagaggtgccattttagtcaatctgtgtgcccaactacgtatagagaatggaaagttaacacacaaacgttttgttctttagaaaaatgaaaatcattcggctaagtccatacagatatatctagtggccagttgtgagaagtcaatccttgcaaagtaatacaagacatttggtgtggacctgagaatattaaatttaaggacagttttccaccaaatcaagcatgtatgttatttctattagaggttctttttcagtcttaattaaattaaaagtttaatctgtaaaccgttagaagtgaatggcatactttgggaaaatgaggccaaacttttagcttatgtgaaaatattttaaagcataaaactgaaaatgcaacatcttttgctcacttaagtataattgcagattaaattttcactttatgacctagtacatagcacttgcaacgtaaaccatgtaataataattaaaaacacactttttgaaacataggcttcaatctctttgaagagagattcaatacatttgaagagagaaacaatacattgtacttgtggccgggcgcggtggctcacgcctataatcccagcactttgggaggccaaggtggacggatcacaaggtcaggagttcaagaccagcctggccaacatggtgaaaccccatctctactaaaaacacacacaaaaaattagctgggtgtggtggtgggcacctgtaatcccagctactcaggaggctgaggcaggagaatcgcttgaacccaggaagcggagcttgcagtgagccaagattgtgccactgcactccagtctgggggacagagcaagactccatctcaacaaaacaaaacaaaacaaaacaaaaatcgtacttatagaatatttatacaaaactcaatagcgtttagataatatctttgaggatctcagggtgttttacctgcagaaataagactgtagtaacttgagggagaagggcaaatttcttttttaagcttaactctattcctgcagagagtgtttgtactcaaagccatgagaggcagcgcatagctgcagactggaagagtgcagacagacaagagttatgggtctcccaggatacagactcttttttttgttttttgtttttctttttgagatggagtcttgctctgttgcccaggctggagtgcagtgatatgatcttggctcactgcaacctccgcctcctgggttcaagagattctcctgcctcagcctcccggagtagctgggatttacaggtgcaagccatcacacctggctaatctttgtatttttagtagagacagggtttcaccatgttggccaggctggtctcgaactcctgacctcaagtgatccatccacctcggcctcccaaagtgctgggattgcaggcatgagccactgtgcctggccccaggatacagactctaattctattattttctaggtctaaaaaaggaaacctatattaaatcacaagtcatatcttgaagagggaaaactaaaagaagattctattgtatcaggtcattttaaacccgaaactaacttttattatcatggccgaattagtgggttcttactggtttagatattaaaacgaatcataaatatggctgtttggcttatatgagttatagatcttatgtgctggcttaaattcctaagttttcaagtggataattctaaagacaacgccaattaattagtttcccagaattagatttaagctgggaaattaatgatagtatgaataagaaaatattatgcattatatttttcattttaaagtttgaaattatttcttagaatcggatctgggtcacggctgtagaattttccattcgatatccttaaacattggcaacattccaaaaattgttactgattccttttaagctttattacccaggatttcattttggtggttaggaaaaaagttccatgaattgcatcctttcacagttagaaatccaagagttcacacttcttgtcagcaggaagtggaggttgggaagagttctatttttggagttgaaaggccacctttgacccagaaaatgtgtggttggatgaaagacgtttctctgttctgtcttacttgatttgcccaaggaatggagaaacatctaagagtgcaacttcagcagacttgtttcctcctagggccggaagatgacctatattaatgacatctaaagaattttagattttcaagtgttttttcagtcccgtgtggcccatgttacagtcatttcaatttagagtattcaaaaccttccaaattgaaatattcatagtgtcccaagatatgagggccacgatttattcttctatatcaggggctgggaaactaagacccagggccaaatctggttgcctgtttttgtaaataaagttttactggaacacagccatgtccattcatttccatattgtccgtggctgcttttgtgacacaatggaagagccgagtacttgttacagggaccatatggtctgcaaagcctaagatatttattatctggctctttacagaaaaaagtttgctgactccaggtttagatgataaggaattgaagagaaggtctacagatagagtgatgtcaaagagcaggggctacacatgccagtatcataaatgtttagtttttagggtctaattgctttttataattagcctaagacttgacaaacaacatttaaatactccaattatgaaatgaccagtttgaactgagggttgtccattagcatagcggtccatagagagagaaatgaatccataagaaggaaatgtcatcctagtacgctacctggctctgaaggaaacaatgcttacaaaatcatagtaatataaatgtcagttattgggttttggctttagaatcaatcaccaaagtggaaaacaatataaatattaatattaacaatgtaaaagtaaagctatagttgtcaaaagttcagagagggacatggagcagtaaggagaaaatctgggccacttatatcttcatttgacatggtgagtcaagggggtctgaagttgatggagcatgaaaaaaatttcttgtatatttttgtatttcactgtttctaaggccccatttttttcaacctgtaatgtctttgaactgggaagctccttactcttcatgatactgtagaagtataattggcagtgctgtttttccttagtggaatagaaaataatggtgcatcttatagtagatggcatcttagatttgatgattacagtattttgagttgcaatagtaactgacagtaagctaaagataatggaaaaacgagtaaaaattgggagggagtagtcaaaggcatctaagtaaaataaatcatctttttttttttttttagagacagggtctagctctgttgctcaggctggagtgcagtggcgtgcatgatcatagctcactgtaaccttgagctcctgggctcaagtgatcctcctgccttagcttcctgagtagctgggactacaggtatgcaacactgcacctggataattattattattattattatttttttttttgtagagatggggtcttgctgtgttgtccaggctggtcttgaactcctggactcaagtgatccttgaggcttggtgtccaaaagcattgggattataggcatgagccaccatgcctgccctaaactaccatcttttatagtcaaaggtcaatagatgatgtccacatgtatgttcactgcagtactattcacaatagcaaagacatggaatcaacccaaatgaccatcaatgatagaccggataaagaaaatgtgatatatatacaccatggaatactatgcagccgtaaaaacgaatgagatcatgtcctttgcaggaacatgggtggagctggaagccataatcctcagcaaactaacacaggaacagaaaaccaaacaccgcatgttcttgctcataagtgagagctgctgaacaatgagaacacatggacacagggaggggaacatcacacacaagaggccggttgtgggtgggggttgggggagagagagagagtcaggataaatagctaatgcatgctgggcttaatacctaggtgataggttgactggtgcagcaaaccaccatggcacatgtttacctacgtaacaaacctgcacatcctgcacatgtatcctggaacttaaaataaataaataaataaaatagatgatgttcaaatatgactttttttaaaggcctggctctgtggctcatgcctgtaatgccagcactttgggaggccgaggcaggaggatcgtttgagcccaggtgttcaagaccagccgaggtgacgtaggaagaccctgtctctacacacacacacacacacacacacacacacacacacacacacacacacagagcagcatgttatcttttcatttaaaaccctttcactttgatttttttaaaaaccatactgtattagtttcttatggctgctgtaaaaaattaccataaacttagcggcttaaaacaacaggaaattacttttttacagttctggagtccaaaagtctgaaatcaaagtgtgagcagggccatgttccctccagagcctctagggttctctgtctcttccagcttcgggtggctgccagcactccttgacttgtggcttcatcattgtagtctctgcctctgtcttcccactgccttctctgtgagtgttaaatctccctctacctttcttttataaggatttattagtgccacgtagggctcacctgaataatccaggataatctaatttcgagattcttaattaaatctgcaaagagcctttttccaaataagataatattcacaggttctagggattagaacatgaacatctctttgggaatcatcattagcctgccacacatgtataagcattagtttgatttttaaaaatgagaagttttaggtcattctacaactttaagtccttcagtcactttccataactcacagaatcaagttcaaataatgtattggttaaaaatacggtctctaaaccaaaagcacaagcaacaaaagaaaatatagataaactgaatttcgtcaagatcaaaaacttttgtgcttcaaaggatactgccaaaaaaaagaaaagaggccggacacagtggctcatgcctgtaatcccagcactttgggagtctgaggcaggcggatcatctgaggtcagtagttcaaaaccaatctgccaacatgatgaaaccccgtctccactaaaagtacaaattagccaagtgtagtaatcccaactactcgggaggctgaggcaggagaattgcttgaactcaggagggagaggttgcagcgagccgagatcgcgtcactgtactccagtctaggtgacagagagagactatctcaaaaaaaaaaaaaaaaaaaagtaaagtgaaaagaaaacccacagaatagaaaaaaactttgcaaatcatatatctgataaggaacttgtatctagactacataaagaactcttagaactcaataataaaaagacagcccagttgaaaagtagacaaaggatctaaatagatatttttaaaagaagatatacaaatagccaataagcacatgaaaacatactttacacctttagttatcagggaaatgcaaatcaaaactacactgagataccttttcatatcgattaggatgactataatcaaaaagacagataatggccatgcatggtggctcactcctgtaatcccagcactttgggaggctg[134 bp omitted]gaggcaggagaattgcttgaacctgtaaggcagaggttgtagtgagccgagattgtgccactgcactccagcctgggtgacagagtgacttcgtctcaaaaaaaaaaaaaaaaaaaaagacagtaagtgttggcaaggaatggagaaattagaagcttcatacgctgctggtagaaatacagtggtcacctgctttgggaaatggtttggcagttcctcaaaaagttaaagatatggtttactatatgactcaaatatttaactcaagaaaaatgaaatcatgtccatacaaaaacttatatccacaagttcaaagcagcattattcataatagccaaaaagtggaaacaactgaaatgtttatccactgacaaacaggtgaatacaatgtggtctatctatacagtggaatattatttggcaataaaagggaatgaagtcctgatacatgctacaacatggatgaaccttgaaaatgttacgccaagaggaagaagctggtcacaaaggaccacatattatataatcctgttgatatgaaatgtccagtgtaggcaaagctacaggggcagaaagtagattagtgattgcctagagttgggtggggactttcagagaatgggggtgactgccaaagggttttcatttatgataattatttctaaattgattatggtcatagttgcacaactctgaatatactagaaacctttgaattgcatacttcaagtgagtgaattgtatggtatgtgaatttatatcacaataaagctctttagatagttagctagaaagtatctagaatcagagagtggtccagtcccagctccaagagaatgtgcaggtggattaaagcaaaaattcatgtaaaacttttgcacaggacctggcacgcagtaggtactcgatgtgtgcattcttattattcacctggcatttgaagcttcctaggactaggcccctgcctatctctaacctccttttcatccctgtaactctcctccagggtgcttccccgccccacccccttaggcaggtatacttaactctttgccttccctgaaacagcttcagcacatcctgcttttactgtaatactctcttttcctcccctaacttcacccggctaattcctctcttcttcctcctccgtgtttcctcagctgtagctctttccaggaagctcccccaagggctctgagactgtccttccctctccaccaggtttgcagctccttctaggaacccctggctcccagaacacacatctatgacagcacttacccttctcagaggtatttgtctgtgtgcctcatgtcttattcaccttttacattcagtgacttgcacagtgaaaaagagtaagaaatcgaagtgccaaataaccaccgggccgacagaggattatcatggcaccagcagttataacaaaaaaagaaaagaaagcattttccacttctctatccagactgaagaacctctctgttttctggggctgaggagcctggcacactgctattgtgccttatcttaaatgcatatgtgtgcagacctgccctgcttctgcctccgtggtgcgacagggaggggtggcccactggctgtcttgtgacactggtgaagtcctatttcagctgtggttttgtcagtttattaacactttattgatcctcatgtccaaacatgtgtattaatgagaagggacgtccaaagagcaaaagcagtatgctgttcacacccggcagcatgtgaaaactgcatttgcaaaccctgtaggaggtaacgctaaaaaaaaaaaaaaaagccaacagttaggggacaagaaggaatgactagttgctaaatatttcccgtatcaatggtatttcaggaatatctaaatatttcctgatcaatatatgaatgactagtttctaaatatttcctgtataagcacagtccagtgaggcctgtgggaagctgccctccaacccttagaagtagtgagttccctaaccccagaggtatccaagcaagggtgggacactttggggagcatagcctacagaggaagctggatttcatgatcattagctccactccgaccctgggattcaatgattataaattacgtatctgggcc[141 bp omitted]gtggcgggcgcctgtagtcccagctactcgggaggctgaggca[152 bp omitted]tgtgagggccggctgggtgtggtggctcacacctgtaatcccagcactatgggaggccgtggcgggcagatcacgaggttaggagatcgagaccatcctggctaacacggtgaaaccctgtctctactaaaaatacaaaaaattagtcgggcgtggtggcgggcccctgtagtcccagcttctcgggaggctgaggcaggagaatggtgtgaacccaggaggcggagcttgcagtgagccgagatcatgccactgcactccagcctgcgcaacatcaagactctgtctcaaaaacaaacaaataaataaataaataaaaaataaaaataaaaataaataaataaataaaatgtgagggctgccatgctgtactactccagggtgcccttcatgtcaaagtctaggcgagtggcacctgtggagtgtgcctagcacagatcttgtagccctaagaggtggcatgctaagtcctgactagataatcccatgcatattaaagcaatacttaaatcttgcttttttttttgagatggagtctcgctctgtcacccaggctggattgcaatggcatagtctctgctcactgcaacctccgcctcccaggctcaagcaattctcctgcctc[132 bp omitted]cttggcctcccaaagtgctgggactacaggtgtgagccaccgcgcctggccaaatcttgcttttttttttttgagacagggtctcactctgttgcccacactggagtgcagtggcatgaccactgctcactgcagccttgacctcccgcactcaggtgatcctcccgcctcagcctcccaagtagctgagactacaggtgtgcactaccatacccagctaattaaaaaaaaaaaaaatttgtagagacactgtctcactatgttgcccaggctggtcttgaactcctaggttcaagcgatcttcctgtcttggcctcccaaagtgctgagattacaggcatgagccactgtgcccagcctaaagcttgctaagttttatatgacactagcttttcttttaaaaattctactgtccaaattgtacacatgattaatgaaatagtggtatattttaaaggaatctccaaaaatgagtaggattggggtggtaaaagttctgttgctgaccacgtcttatgaaggtactcttagagaatactagcaatcttctctcttccccattgttagaaagacaaggatagaacaacacctctcagggatcctgggaaaatatgctagatgttttggaaagtaggtatacttgcatatagaaaaataagaggcaactatgtgttctttgcaagtatcacatcagtcaggcagttgctttccttatttttattaaaagagaaaatgatcaacacttgttcatgcatacacatatacacacacactcatacttacaacctttactatgtatgcttttctaagcataatatatatatggccaaattagtcaaattccccattttattagttgatctggtaaaatatttgataaaatgcatatttttagttctctgtgacttctctttctccaagttttctctgtttcctatatctgggcacagaccttgtccacctgccttgcgtattgatatggagtctctgcttagtgtaggggagcaaggggaggaggcatctcttccccttacaaggtctttgttccatcttgcccctctctggcctctcccgctgaatgcctgtggccccgagtctgcatctctctttgggcagagtgcgcaagacacaaaccaaggagtcagactcgagttggagtcctaactctgcacttcccagctgtgggcacctctggcttacacagcctctccagggctcagtttcctcatataaaaaatgggagcaatgctcatctcatggggttatacagggtaagtgagaaaacgtatgtaaagcatgtggctcagtggcagcacccaggaaacatcagtaaacagtggcatattattctcctgttttaggcttccttctgaatgtagtcagtccccattattagatcgtaaaccctttgagggatcaaatatttattgaactaatggggaaaggaacgtgagaggagtggaataccattccacctcttattaggaagacactcacagagaatcatgaccgctgtcttacttctgtccctaactggtccctagttaattgatcagcctaaggctacattgttctaccagccatatggtagactttaattagtgaagatagtaaagcatgaaaggtcaattattatacattcttattgtgatacataacctctcagcttaaattttatatgcaattcgccacatgaatgacatctccaatttctgaagtatccaggtgattttttttttttttggggttccacataagtgtcaatctctacaatactgaagaacagaaagtaggatgaaatgctttctccctttcctctgtacacaataagaatttaaggtctgtttctttttctcggtgtcttttctaaaggacttggggtacttgggagtatgcatctgaagccctgagctaaactcctgtgatatgaattttattgggtttgaaccagggaaagcttctagtggagactcatatgattctttcacactcttggaataacagccactgaggccttgccagaccacgtggctgcagattcacagtctgggtcgccttcccttcacacacccgccctggagcacccaggctgcctttgtaacggccctgagctgttaatggttctgatgctgcacccggtagaaatggctccctcactatggacttagccactttgagggctgaacagtagctcatccactctctggttttcctttggaattcagtaatgaactcattaaatcaccaacttgttgtgacaggaagtcattcagatgctgatgctattgccatggaaaccatccctctgcgaggagctctgtctgtctttgtcgaggagcactccagctccataattactgtcacccccaaataacacagagccatcacgactgtgagcaagtccagaagcaggggcacacagaaaacctattttgctttcagatgatgaatccttgttggttttagtatttttagcacacatttctcttctgtgccggttgtctttttaattcctatgtgctggctgctttccagcacctttcctagagaagcagaaaaaggatttgtggggggcatggctgccaaggatattcatttaaaaagaacctactgtttccccaaacccctgtgctcccaaatatgaaaatatgagttctcctgccttttagttgagactccaagaaaggaatctcaaattcaattagtttacagcctataaaatgcaaaggtagtactgcaaatcagtaatgcccagatgcaaattcagaggtgcacctcaaagtgatgtttgctttattttgtttgggttatctaggctatcactgagctccattattgaaggctggccaagtcacaaaaataagaaccttttttttttttttttagagacagggtcttgctttgtcaccaggctggagtgtacagtggcacaatcacagcccactacagcctcaaattcctgagctccagtgatcctccttcctcagccttctgagtagctggaactacatcaccgtgcccagctaattaaacatttttttttttgtaaagacagcatcttactatgtttcccaggctagtctcaaattcctggcttcaagcaaatcctcccacctctacctcccaaagtgttggcattacaggtgtgggccattgtgccggcacgagaactcatctaactcaaagcagcaatcaagtcttttttcatatatgttacagcacatggtatattgtgaatattcaaagataaccagcacctaatgagtacctgccagacacagcggcaggcaatttacattatgtttcatgatttaaattaatctgcataaaaatcccatgggacaggtatttttatcccagttttacagctaaggaatgtgaggctctaagttaggtaaattaaataaatgccacgcttttccatatgcatagtcattaacatgtcacacttcatgtgtccataggcataaaggtgacttctgctgccgcagaatcacagaagctcagattaggaaaggttgttcataattgtcttgtccaaccaaccaaccgcttctgcagcatcccaagtgattgtctgatctcagcctgagtatttccagtgatagagaattcactatagtagctcagcgcagtgggtcactcctataatcctagcactttgggaggccaaggcaggccgatcacttgaggccaggagatcgagaccagcctggccaacatggcgaaaccctgaatctactaaaaaacctacaaaaattagccgggcgtggtggtgcatgcctgtagtctcagctacatgggaagctgaggtgggagaatcacttgaacctgggaggcagaggttgcagtgagctgagattgtggcactgcactccagcctgggtgaaggagcaagaccgtgtcttaaaaaaaaaaaaaaattcactacggagagtggtccattttggacagcccagttcttaatttccttagtttgttcttaacatgacgagagagcactcatcattgcagttgctatagaaccctaagccctttctttctgggtttgtcacctgctgaagaaatttggctctggccaaaagtttgtcctctaggcagggcatggtggcatgcctgtcattccagcactttgggtggctgaggtgggcagattgcttgagcccaggagttggagaccagcctgggcaacaaggctggtcttttatattttttgtctctacaaaaaatacaaaaaattaactgggcatggtggtgcacgtatatagtcccagctactgggaggctgaggtgggagaatggcttgatccgaggagaaggaggttgcaatgagccaagatcgcgccactgcactccagcctgggtgacagagcgagacctgtctcaagaaaaaaaaaaaaaagtttatcctctaggattatctaggtatagaaggcagaggagggaaaatgagaaggggcctaataagaaggagttagagctaggttaagagctgtctgagctcctcaagaagacctcagcaggtcactggctctatgagcatttggcaacgtggggaaaaatcctgttttccagtgccagtgggaagtcactgtgttgcatgggacaccaatgaggggagacctgacttcttattcagtaccactttaaattctttttaaattattttttggtctttttttttttttttgagatggagtctcactgtgttgcccaggctggagtacagtggcatgatcttggctctctgcaacctctgcctcccgggttcaagcaatactcctgcctcagcctcccaagtagctgggattacaggtgtgcaccaccgcgcctagctaatttttgtatttttagtagagatggggtctcaccatgttggccaagcttgtcttgaattcctgacctcaaatgatccacctgcctcggcctccaaagtgttgggattacaggcgtgagccaccgcgcctggccgacttttaattatttttatatatatctgtatacacatacatttacactgaaaaaatatatgttacacaaaatgcataatcctttttgtttgtttgtttgagacagggtcttgttctgttgtccaggctggagttcagtggtgccatctcagctcactgcaatctctgtctcttgggctcaagtgagcctcccacctcagcctccagagcagctaggactacaggcacacagcaccacacccagctaattttgttcattatttttgtagagacaaggtctcactattttgcccagacttgtcttaaactcctgggctcaagtgatccacccagctcagtctcccaaagtgctgggattacaggtgtgagccactgcaccctccctcttaatcgtttgttacaaatataaacgttaaagataagtagtgagcaggaatccctgggccaccttctgaaaatgttagcgaggtcataggaggggcatagcactgactttctaatttacgaagctctgttttccgtagtgttaatgtcacttctgtttgtgggaattataagtttaaatgcacatagctaacgtttggagagggtctgccatgagttggatgccatgctaggagggttacactcataaatggtcatttgcctctgcttcagtctgggaactacttggtggcaaggtgtgtggtctatgcaaataccaatgacctgaatgacttttgtcaagtctcttcaatcccagagcctcattttcctcatctgtcacatgaaggacacgttaattgcattaactatcttatggaagtattgcgaaataggagtaaaatgcagtgtgaaagccttttgtatcctcacagacacacccaggatcaatactttgcatctttcaatccaatgaagttgacactcagtattatccatcacaaaaagcataaaactataaagttctatggaatgtgcctaatttagtgttctatgatagtgaatacttaacggaatgaaaagatcagtattaataatatgttaggtcaaatctcctttacaatgaatcccatgaaaacaaaatgattttcaagctttgagctataatttttttttttttttttgagatggagtctaactctgttgcccaggctggagggcagcggtgtaatctcagctcactgcaacccctgccttgctggttcaagtgattctcgtgcctcagccttccaagtagctgggattacaggtgtgcaccaccatggccggctaatttttgtatttttagtagagacggagtttcactgtgttggccaggctggtctcgaactcctgatcttaggtgatctgcctgccttggcctcccaaagtgccgggattactgcgcccagcctgagctatgctttgttacaagaaatatgccatataaaattttttcaatactacagagttgcaatttttttttggtgttcactgtctcatgatctaacctgttgcaaagattaaagcaaaattttccacagctaatcacagaggattagtaaggcctctataataccacacattaaaaatgaggaaatcacaaactgagtcccatgtcttcattctttgtagatttgttttctaggtaattaaaaaggtacttgcgaatatactctgcctacttctaaaaagtatttggggatagcctataataatagaaataggagtaataaaagtgggccacgcactgtggctcaggcctgaaatcccagcacttttggaggctgaggagggaggacagcttgagcccaggagttggagaccagcctgggtaatgtagtgagatgctgtttttacaaaaaatttaaaaattagctaggtttcagctacttgggtggctgaggtgggaggatcacttgagcctggaaggttgaggttacagggagctatgattgtaccattgccttccagccctaggcaacagagtgtcaaaaaaaagagaaagaaatgataatagtgaaataattttagaatattttcatccaatttacagccatttcttaatattatcagcgaaacagaattaatctagagttagaaatgagatctatagtttctgacactgaaagtattttattcactataactaaacattgagtggctggtagctgataatgaatgacttctaggggtggggagcctgtagaattgtcccaaactataggactcaaagacaatgaacataaatgtaattaagaagtggattagatcaagaggcagtgcatgctcagatcatacattttgcttctgtttggatgtaacagccagccttatgcagaatatattaagaaaaccacacaaaagggaaatgagtcacttacaaaagaccagaaaagcttaggctaaccggctagacaagacttggccatgtctttttctgccttggtttcacttgtatatcctgaaagcaccaccttgtctgaatcacaggagagaaaaatgtttttggcaaatatacattggacacgtccagctttacttttgctctttctctatgtccccccacccaccatcccactgccacacacacacacacacacacacacacacgcatccaggtggctttggaatgtatgtggcttttcccttcgggagtctcaccttcataattatgtttgacctggactaacattaaaacattttgctcttcccgagaacacaccaatcagcacgcggttccattttctcatggatcatgacccattatcctttctattttctgctggaatgaaagttccatggcacaggaacaccgtctatatcttgctcacttcctgtacagagcctggcacattgttggtactcaataaatatttcttgattgaataaatattttcagtctctcctccagtggctatctgctttgtccttagcctagaagcatgttcaaatctcctccagtaaacaaaagaccaaaaagtccacctgttcttccctatccctccactgctaccaaatgccttgaagttaaaataaactatccatagctaatgtcttctccctcatcgtactttgcagtcaagctttacttatgcactgttttttgttttgtttcgtttggacagggtcttgctttgttgcctaggcagaggggcattggcgtaatcatggctcactgcagcctcagcctcctggactcaagcaatcctcccacctcagcctcctgagtagctgggactagaggcacacactaccacacctggctaatttttgtattttttgtagagatgggggtcttactatattgcccaggctggtcttgaactcctgggttcaaataattggcccacctgggcctcccacagtgctggtattacaggcatgagccacagcctggcctgcattgctcactctttaacctttgtaatccatccatccatccacccatccatccatccatccatccatccatccatccatccatccattcatccatccctcccctccttgtctccctcccaaccatctgttcatctgttcacctccccttttttgccctccttccttttatccatccatccactctttcatctcccaccttcctccttctgtcctttgcttctgtaaatgtatacaccaatgcttactatgtcctaggtactgtgctgggtactagagagaggatgtttaagaacagtcactgcagtggaaatgctcttgctccaatggaagatacagatgtggaaactgaagcttcttaaaccgggacacgattatttcccttggatgtgcatcagggtgctatagtaagcgaaaccacagaacgaagatggagaaacttgctggagactaagctttactccatgtaagtaactggaaacacctgacacccaagtaaattaaaaccaacatttagaatgacagcatgaaaaacagcatcaaccattaccaaaacacaggcctttaaagaagcatgccaggctgggcacagtgactcacgcccataatcccagcactctgggaggctgaggcaggaggactgcttgagtccaggagttcagggccagtatgggcaatatagtgagatgccattctctaagacaaaaaaaaaaaaacaaaaaacaaaacaaaaaaaaaaacaaaaaaaccagcagcatgtcataggctgtgttgggatatgtccctggtgaatgttgagttaactcttccctgttgctgggggaactccttagaggagcctgaaaagcactgagaagtagaaaactactacacaaggtggcatgctagctagagagatgaactatagtgccaagggacctctgagaaattcacaacagtgttgagtgaattttgcagaaggctgaataggactgcctttacagaggaggcgatatttgaagtggttcctgaaagaggagtggctcaccaggaagagcaggggagagtattgtgggtggaggaagcagtgtgtgcaattaccagggctgcgaatggacctgacatagaataggaaagagtctagcagaaagaatcagctcctcttctagcagctgaaaaaggacgtgggttttgatggcacaatgaagggcctaggtatcttgctagaaagttccaaagctgaagaccattccctctccttgaaactctttttctctcggcactgctgtcattctgcttctcctacttctttgacaagttcttcttagtcctgtttacttatttctcctcctcaacacccctttcccacctttggaatgttatgttcctgagagttccttattggccatgtttttcttcttcttctccacacatggcttgtttcattcactcccaccacttcaacttcctttaagctggcttcccaatccacactccccagtacagactcctggggtccaggctccccgttctcactgcttagatatttccacctgaactgaactatatccttttaaaataagtacgttctaacatgtctgtgtcatcttccatgctcttcccctcctttctatggctctgcctctgcctcccatagttgttatggtctaggctaatggaaccgtgatctaccaactcacctaaataaaatacctgagtcaccagttactctgctcatcacctacagccattcagttgcctgccctcctgagcctctgttcaatatgttctttcctttaaaactccactgggattctcaactgagctgagagtccctgcccctgcccctgcccctgcccctgcccctacctgaggttgagaatcactgcacatagtgagagctactcctgatgggtgtactctgtacaattagactgtgtgggggcaggaaagggttggaatcactgccatggccagatccctcttgggcaactgcaacacctagttaattggtctccctgataccagttccttcccctctggaaccttctccacacttcttcagttatctttgaaatacagaaatctgattaaagatgacaaattattgaaatttataatataaaaattattaaaatttgtaaaagtactgaagaatgggaaggatatataagtgaatatttacctgatctttcagtggggaaaagcattcatgtaaaggctaaaggaaaggacagaattgaccacatacaaatgcaaaacttttgttgaaaaaagaatgcagaaagacagactgggaaagtatctgcaagtagtgtaaatggtcttaatatataaaaagctcctaaaaattagtaaccaaatcataaacacaccaaaagaaaaaaaatcagcaaaggatatgaataatccatgaaacacgtacaaatcacaggtagacccatggcagaaaacgttcaatttcatttaagaaatgcagactgaaacaatggatatacgaagttttttccttttcaaacgggccaattaaatctagtgcaaagtgagtagcttggtaagtgaagtatgctcacacttggctggtaggagcataacatggtacaagcttttaggaagctaatctagaaaaatgtacgaaaagccttaaaaaatatacactttttgaccccgcaactctgtctctaggaattcctaaggaaacaattacggatatgaataaatacatcattttaaggataattatcacagcactgtttgtaaggctgaaaattagaaacattctaggtgctcaatcgcagggcttgtcgaataaatgtacgaatttagcacaaatttcctgtgtcactgttcctttccagcacagcctttaacacctgtgtggttagcatgaaataccacacagatattacaagctgtgctggaaaagaacagtgacacaggaaaacattttcagaatgtttgctctatattgttaagtgaaatcacaattataagatagaatgtacagaagaatctcatatttgtaaaactatacacagatctatatgcaaagaagatataaaaatgtgaacaatggtttgaatgtgtgcttccagttttttttaatgtacttgtgtatattttctaaaatttctacaaatagagttactttgttgtcagaaaaaatatttttaagtggaaacacaaaatcctcctctgttctggctgcctgttgtctgttgcataaaaccaaaatctcttgacctggtatcctaggcttgtcgcaatctgcctcctccttggctttccagcctgcttttcccgctcgtcccggctagaatcctgtatccgtggcacatccaccaacacccatgccattccagacccttgcccacaatagccacacccctcctcacaccacgtgcaaagccgtggctaatggtctgttcctccaactcctggccagctttcaattcctcaagcatactaagttcttttctgcctcagggcctttgcaccaactattcttcctgactgggttggtcttcacagttcctgttcatcttccgagcctgagctgaagtgtcacctcttcatttggccttctcccaccactctatgaaaagagggcacctcgttttctgcctcagagccctgcttattcctccttagcacttatcatatcgaattatttttactcatttgtttacttgggttttgtgtgtttgccccactggaatgtaaggttgagaacagggagtgtgatgtgtctaacccagggccttgcacatggcaggtgcacgtagttatttacggaatgggcaaacagtgggaagaccaactgctttgtaaagcctttctatgtgctgccatgggactcccaatgggggagactcatctctaccaatcttctcttacctatatttttctaacttaatgcagttctttctttacagctgttgcctgccatggactgtaggtgctctgacacagactggatagagcagccaaggcctggcccactgcaggtggtcaacaagtgggtgctctgaatgaatgggtgagtggggctcctgagggctcgaagtgggtggaggaagccattctagaattgaacagttgctacaggtcacacagatgatgaaacactgcctacaggccagcttcagctcacacaagcccactgtaaaccgtgcagacacagggtttatggccacaatttttttttttttttttaagatgggatcttgctatgtggctcaggctggtcttgaactcctgggctcaagagatcctcccacctcagcctcccaaagtgtctggattgtaggcatgagccactgcactcagccaaaatgtttaactacatataaaactggattttagcaacaagttagttagcaacttattcttgagcttcacatttaaaaaatgaacatcacatttaacattaagaccatgggaattaaatgaagacaaaataggaatattatagtgttttgggtctgtgagaaaatgatttgtgctaaactccctaacctaaggaatttacaggctctttgtggaacctgaaacttgatgatgtttgtttcctttacaatgtggcttggtgagacctctaggaagagatctcacatattttacagacaaatgatgcagggaaatcaccccaattaaagcagtttaaactatgatgaatgtagagaatggccagcagcttgtgggacaccctgcagttatcattcagtgaaatgatgtgtgcctttcactcggcaggcttagtttatccatttttttttttttgagatggtgtttcactcttgttgtccaggctggagttcagtggcgtgatctcggctcactgcaacctctgccttccggtttcaagctgttctcctgcctcagcctcctgagtagctgggattacagatgcccgctaccacgcccggctaattttttttatttttagtagagatggggtttcaccatgttggcctcgaactcctgacttcgtgatccacctgccttggcctcccaaagtgctgggattacaggtgtgagccactgtgcccggcctagttcatctttagtaaaggtggccaaactgggtggggcttgagatgctctggtgctctagttcaggagtcggcaaacttccttttttttctttttcttctttttttgagacaaggtcttgctctgtcactcaggccagagtgcagtggcaggatcttgggtcacttcagtctcaacctcacaggttcaagcgatcctcccgttacccaccctcacccccatccagtagctgggactacaggagcacgccaccatgcctaaattttgtattttttgcagagatggggtttcgctcagcaaagtctttctataagaggaaagatggtaaatatttcagctttgcaggtcatacagtctgcactgtaactatgtaatttggacataattatataatgttttgtgacacctgaaaattatataaaattcaaattgtgtttataaataacattttatgggaacacagccacgctcattcatttatgtccacactccacagccatgtccacatttattgaaactgtggacgtaaatgaatgggcatggctgtgttcccataaaatgttatttatagacacaatttgaattttacataattttcaggtgttacaaaatattaaacctctcttgagtttttatccccttaaacatataaaaatgcaaagtcatcttgggggtgggccagattctattgtggatcaaagtttgtcaacctcaggtctagtttaaaacagtttgtctgtgtgggaaaccatgggatgataaaaagaaacactctgagaggcagggccctccttgatctcaagagtaagttccaacccttgagtgcctaggcccaatggaaacaatttatttctgagcacagccaggctggagatgggcagcagacagttaacactgaacagaagatggagcagcaaggaaacaaggctttgctctcagaagagaagagtgttctttgaagtttgattaaaagtgttttacttcacaccttatggaagcacattacattgtgctttttcactgcaggatgaacagaaaatcagtaatgcactgctatcatcacatgctcacacctgtggtttgaaaacagcaaacaaaccactctccatgcaagggcgcattgtcagataacacaaccgctgagaataagagcccagaaatgttctttcttttcaagagaaccaggcttcctccacagttctccctggttttgctatagaatgaattcccagggagatgagaggatatagaggtcattaacacgctccgtctcttctgcccctctcattttctattttaaaatgtgcttccgttttaaatattttacttcctctgctttgaataataccagtaccctacatctgacagggagtatagtcttgggacaagacactgaggcggggagtagatgctggagccagactgtctgagctctggtccattactataataattagctgtggtcctgagaaagccactgaacccttccatgcctcagtttctccagctataaatggcagtaataatagggcccaccttctagagttactgtgaggcttatatgagctaacatatgcatggtgctttcaatatagcctagcacagactaaggactagacaaatgttaactatttttattatctgcatgtgtttaataagtatctcagaacgtgtgcttgtgtgtgtgcaatatgaaccaaattgtctttcaagggcttctaaattactgaattggatcttgaatttcctgaactttacttgttggggcatgttctttaaagaaaagcttgtataaaaaagggtttgtaatccatatacaatagggatctcaactgttttctgaagcgcaatttatttttctcatatacttttcttaaattaagtttagcttaatgttgcctccttacatattttaagtttggactaaaggtttctccacacataatgacctgtaacctaactggatgtgtgagcagaccataatctactcttgaaactcggagctgagtctcactcaatcacttgagtttcagctgagtttcagccaatcacaggtgttcagctgttcaagccaaggtcaaataaggcacatgctcagctgtagccaatccagctgcttctgtagtttacttctgttttgtatactcactttctttttctgtccataaacattatctgaccatgtggcagccccagagttgttctcaatctattctggttccggaggctgcctgatttgtgaatcattctttgctcaattaaactctgttaaatttaatttgcctaaattgaacacttctggcactttgttaccattatctttttatcacatttcatcatttccatcctaatacgttttactatctttaacttctctttttattgatatctatcattaattttttgtaatttaaatcaattatatccattcccagccacagacctttaaatgaagtatttcttgactcttcagtgtcactgtctgtatttgtcaatgctatggtattgtaatgcagtgacacagta[138 bp omitted]ggtgaaacccccatctctactaaaaatacaaaattagccaggtgtggtggcatgtgcctgtaatcccagctactcaggaggatgaggcaggagaactgcttgaacctgggaggcggaggttgcagtgagccgagattgcaccactgcactgcagcctgggcgacagaatgagactccatctcaaaaaaaaaggaaaaagtgtttgtgacaagctgtatatgcctgatgttaaaatactaaactattctgaagaataagctagtctcttcttttttgcataaatatggtaattgattcatatgactatggcaggttatcagagacacagtttctggagtttaagtaatactgagatgaagccaaaagagacagtagtagtccacaaaagttactgcaagaaagaaatgtatgttatggagatatttaagtaaaaaaaaagtaatacccagagacaacatatatatatatatatatatatatatatatatatatatatatatatataacttttatacctaaagttaaaaattctgactcaagattagccggtgaatcttttttttttgagatggagtcttgctctgtcacccagcctggagggcagttgcaaaatctcaactctctgcaacctccgcctctcgggttcaagtgattctcctgcctc[131 bp omitted]ttggcctcccaaagtgcgaggattacaggcatgagccactatgcgtggcttttttttttttttttgagagtcttgctcttgctgcccaggctggagtgcaatggtgtgatctcgattcactgctacctctgcctcctgggttcaagtgattctcctgcctcaacctcctgagtagctaggattacaggcacctgccaccacgcccggctaatttttgtatttttagtagagacagggtttcaccatgttggccaggctagtctcgaactcctgacctcaggtgatccacccgcctcaacctcccaaagtctggcattacaggtgtgagccacaaagcccagtctagctggtgaatctttcaaagagaggtatgtttttgaaaatgtgtaagagtaaaccggcacttataacatccatcactcagtcccattacaaattctacatttgtaagttctttttttgcttcaatttttttccaactctctcctttttttttaattctaaaattcatacatgtttattgtagaaaatttggaaagtggctgggtgtggtggctcatgcctgtaatcctagcactttgagaggccaaggcaggcggatcatgaggtcaggagatcaagaacatcctggccaacatggtgaaacctcgtctctactaaaaatacaaaaaaattagctgggcgtggtggtgcgtgcctgtagtcccagctacttgggaggctgaggcaggagaatcgcttgaacccaggaggaggaggttgcagtgagccgagatcccgccactgcactccagtctggagacagagggaggctctgtctcaaaaaaaaaaaaaaaaaaagaaaacttggaaagtgacaaaaagctataaagaaatcaaattttatccataataccatctcatcatctagagagagaaccactgttaatattttgacatattaacatagaaatattatattttacgtatccttttagtaattaacttttgctataaagagttaaaaattttctgtgattatcaagcaatatgtcctcattgaagtaaagctggaaaacacagaaaagttcaaagcagtaaaaacaaaagcagtcagcataaaccattttggcatattttcttctctctcttttttttttggagacaggggtcttgctgtgtcacccaggctggagtacagtggcacaatcacagctcactgcagtcttggcctcctgggtttaagccactctcccacctcagccacccgaggagctgggactacaggtgcatgccaccacgctgggctaagtaagtttttgtatttttttgtagaaacgggtattgccacgttgcccaggctgatacgctcgttctttcaatgaacattttttttgaaattgtgaccacaatcagaatataatattacacacataaaaaaacttattttatcataagcactttcctttgacatcaaaaagtttgtaaaggtaagctgcaaaatatttcatttcattctttaatcatttagactgtttccagttttttactatttataaataacttatttatggatctttacatataaaattgtgcccatatttctgattattttcttaggatatttctttccttttaaatttttaatttttttgagatagggtcttgctctgttgcccaggctggaatgcaatggtgtgatcaaggctcactgcagccttgacctcctgggctcaagtgattcttctacctcagcctcatgagtagctaggactacaggtgcgtgccaccaggcccagctaattttgaaactttttgtagagacgaggttctgctatgttgcccaggctggcctcaagtgatcctcctgcctcacctcccaaagtgctgggattataggcgtgcgccaccatgcccggacaggatatttcttaaaaggagattgttagggaaaatgatgtgagcattaaaatattagtaatgttattttttccctttaattctaaatgtacaacataaccctagaaataattatgattaacattttatggtatttcctttgtctttttaaagggaggggcatttgaaagacagttcatactttcaaatggttttctagatttatatcaattacctctcagcagcaatatatcaatgcagaaccttactgcattctcgtgaatgtagactattatcaaaataaattatactgacttgaaggaaaaatcgtatctcattgttttgttaagacatctttgattattaatgaagttgagcttctgtttttctaaatgttaactatttatatat[133 bp omitted]acctccgtctcccgggttccagcgattcttttgcctcagcctcctgagtagctgggattacagacacgcaccactgtgcccagctaatttttttttttcatttttagtagagatggggtttcaaaccatgttggccaggctagtctcgaactcctgatctcaagtgattcacccacctcagcctccaaaagtgctgggattacaggcgtgtgccaccgcacccagcctgcaattacggtgatttctaaatatataaatgcattgatggaggatgagattgatctgtgtgtgcttcagcacctgcatcttaacgtcagtgggagaactataattgcaatgaaaacggacaataaaaagacatacaaatagttaacaaacatttggaaaaacagaagttcaacttcatttcaaatggagccatcaacagtacactgagttctacttcatgagaaggagctgaacagtcgcgtggcttcctcattcctcaccctgtccctttgctgcacacgtggcattcaatcacacctcaaactgctacatattggtttaagataagctattaaaacatttgacttagcgtatttagtttcttaaaccccttttgattcagtatgatgctgatcttggtttactacaattcttgctgggctaaaggctgcaagggaatatgcaagtagcaggagacagtgagatcgatccatcaattgattaaaatctctttgctgaaatttatctgtaggggtccagaagccactttgctgcctccagcctgcccatggacaattagcagataatgtacagaagtatttctgctttgcaatagtggcttccaaagacccttgtggagtccctggcctgcaggtgctggagccctgcctgggggcagtaagcagagcccaggctaacctgggaatggatcctcatgccctctgcttcttccccttcatgagttgatccatatgggctgagaagggggctgtcaactagtaggcagattttctttaccctccctctgaagtttctaattactcacacaagtctggatgtgaagctgacatcagcttccttcacagtgtcacctgggaaaatcttggtcagcatgtggtccctttcctttctaagccgacaccctctacttagcaattatgaagtggctttacagtcagtgctggagcatagtgtacagcccagggtgaaccctacaccatcccttcccttaaccagagcctactgacctacctgctttccttccttccctctttcggtatttatttagtgtttcctgtgctaggtgctagggatgagtcaaatatatttatgacatggtccctgttctcaatgaacttgtggtttaatgggggagatggactaagtagacagacgactacaaagtaagtggcaaagcagcagtgagcacaagacataacaaagagctggaagcccttccacatagctgcacctttaaccctgactctaaggcatcaactgaggctccaagccatgtggtgtttacagggaagagtataggaacaaatccccatcaggcctgtctgcattttgtggtcactgttacaaaggtcaatctgtgttaattctagaaacagcataccccccatctcacaattacgttaaacagtccatcacccttgatgataactcttcctgcttcataatgcatataactagacatcatttcattataaagaaaaagaaaatactttttttctttttggagatggcttcttgctctgtcacccaggctggagtgtagtggcgcaatctcagctcactgcaacctctgcctcccaggttcaagcgattctcttgcctcagcttctggagtagctgggactacaggtgttcaccaccacatccagctaatttttgtatttttagtacagacagggtttcaccatgttggccagactggcctccaacttctgacctcaggtgatcctcctgcctcggcctcccaaagtgctgggattataggcgtgagccaccacacccagcctgaagaaaataccttcatgtgcaaaaactgctcctttaagatagggttcttccttgtagcaacgaaaggcaccctggcactgctcacttttatgatgcagctcccacctccatccccctaaaacctcacctctggaccctggagatatgacctggtgaaagtggctgctcagattctggaatctattcagcccttagccctcgatcatctgctttgtcacctctgctctcaggagtggccagtcttcatatggccggtgacataattgctaagtaggctgctgtgaatgcccatctactcaggactgaactgagctaggtcatggccatcagtaaacattatcaagtaatgactttgttaccactggcatctgaacaggaagtccagatctgaaggtcaattccacacacctgtttcagagtgtgtgtgttttttttttgagacagagtctccatctgtggctcaggctggagtgcagtggcgagatcttgcctcactgcaacccctcccaggttcaagtgattctcctgcctcagcctcccaagtagctgggactacaggtgcgtgccaccaggtgtggctaatttttttttgtatttttcatagaaacagggtttcgccatgttggccaggctggtcttgaactcctgacctcaggcgatccacccacctcagcctcccaaagtgctgggattacagatgtgagccaccgcacccggccttcagagtgtgtttctagctaagattgaatatatgcagtgataagaaatccatctacagcttcctatatattcattcaacacatagttcctgtgcttctagacggggaggtagacacagtcctcccctcatgtgctccttataaccccctgaaagtgacagatgttaaataaaaaaaaagtatacgaaaaggaagtacaactgtggtgttatgaaggagaaaaccagagtgctagaagacgacactaacatgaggacttagacttgtttgaggagagggtcaggaaaaggcttccttgggaaagtagcatttaagctgaaacctggaagatgcacgggggcttggggaagaggttaggaacagcattcctggcacagggcacggcaccggagctgtctctgaggtaggcagtgaggggctttccttgaggaagccaaggaaagctgctgtggcctgcaggtgagcctgcaggtaagtgcaggaaaatgcagagtgaggaggtggggccacatcgtgtaggctgtgggagtgacctcagacctgatcttgagtagccactgaaggaggggagtgatatgattggaaagtcaactgagtccaaccacagttgggaaaacattttttgactcgtgtcattggaaccaaatagaatcaattaatagtagtaacatgacagtagttacggttgttgtccgaatcacagggagtgctagaacttaattagttatctgtttgaagcctcaaacacaaacttccaaagctttaaaaagcaacttgtaaaagcttccctctttggtctttctcttttaagcttctttttaaccaaatcaggcaggcactgtgtaccaagcctctgagacacatctgtgtgatctttccaacagaggaatgggagcctctgcatccaaggtggggagcggcagagctgggactgagggcagaacggttgattccaaagcccgtgctccatccatgttcacagaatggaggaaatcaaaaaggagcagatgatgcggctgcaggcttctgggatattaacaggacaaagctactgagaaaacaggggtttctggctgaaggtagaggatgctgggaaagggcaacaaatgaaggggtggcagaagtcaataaattgagcaggaaatgaaaaaagaagagctgaattagagcatttgtctaagcatcctgaggacaggaaccttgtttatcctgttcatggctatatccctagggcagagaacacgactcagcaagtgacatgtgctcaagaaatagatgctgactcagcgaatgaatgtatttaaacagaacctattctgtaataatcactatgacaacagttaataaaatcagccaccgtcaactaagcacctacatgtgccacacctgtgctgggggtttggctaggttaacacaaacccaaccaccaggtacagcaggtgttgtcgtcacaatcctgggaaggaaataaggtacacaaaggttaagtaacgtctgatgtctcttgtctagtaagtagcagggatggacttaaacacagaccaatctcactccaaaccttgtactctttctctgccctgtgctgtgttgcttctcaagcatgaacatgctaagaacttgggcttcagtcatggccagtcccttcaggatgacttggccactgtagggtctcattctttcatcattcttagtcatcaagtccaagtagccctggaagaagggagcatatgtgcacagaaggacacctacaggaagcatcttaccaaaagtgccttgcatcattgaggctgtgtccgggtagttcagtggtgctaacgaggccactgctacaggttcagtctccacgtccaattaactcagctttgtgccttggagactacaccccaatccatctcagaggtgcattcagtagtttcaggaaagatggctgggaagtgtgggtggcttggtgaaacctatttgcaagactagcaaaacaatgcaaaaggtatgctgcaataatggtgagcggcagcttcctagaaaaaggtcacgcaaacttctgcaccaaacctgggtgatcagagctcctctgcaacattaagtcctttttcccaaaagagtcttgagattttttcccccaggtatttatcagaatcctctttatctttctgcgttattacaaaaaaaaaaaaaaaaggctggtgtcaggcagctagcattatttctgaaaattactgagaacttaaaagacattcagaacatctatgcaacttgacacagttcaaaaaattgtcattggaaacagagacaatcttataaccaacatttaggcaagtccatgtttagaatatggttagttttcaaggcaagtatgtttcattctacttctgtctgtatggagagattccgtctctagtctcatccctttgcaaactgtttttctcatggctgctggagttatctttccaggacacatatctgattcattcatttgctttatataacctatcaaccccctttgcacagctgtataagtcaggtgtttgtgggacttatcatctatctgggacactcttgagagttaaaggacgcagctctattgatgattatgttggagcaacagacataaaccttgggaaactgggatctgtggtcacctcacatggaatagaaggtccttggcaatctgaactgaacccacattttctgactcttccccacccagatcagcctctgagagggatctgccctttccgtgctttctgtcccagacctcagcccttccagcttctcttctggaagagtgagtgcacacacctccagagcagctcgaagtgcagttgcacctactcactggaattacaggtccagcctctatgctcctatgcatcttgactggacacagtcatcatttgtttttatgtgtattgccctctctagactgggaactccttgaggttggggggtttaagtcatccttgtggccacccccaatatgtagaggagtgttttgtacatccttcgtgttcagaaactgtcagttgataataaataaatcccacgactagataatctggtgccttttaaataaatacattgaggtctgtgttataaatagatgtttatgactaaaatgttttatggcagagctgctgactgtcctggtgtcatagaaacttcagctgatttccatgtgagtgtatggaagaagtaatatatgagcaatctattttctctgggtgaagacagcaatgggcatatttcacttccattgttaattggggatagtattgctctaggccaagacactaagtcagctaagcgctgactaatcgaggaagtgtttgcaggtgcactgggcccaaggacacacaggcctcttgtactttaacttacatgtggtgttctcagacctgcatgaccaattctgcaatagtatctgccacagaaaagacactgtgtgaaattcttgtgcagctcttccccatctaacctgttcctcacaatggtgaacacccaggggaagtgaaaggaagtgccccagactgagactgggaaccgtcacctcccactggatgagcaatgggagacgcccaggagtgtgaattccctgcctccataatgccttttctctcccaaagcattagtcttggagagatgagcaatgattggtaactctcctctctagttaaatctgaatttccagttgctttacagactgagaaagtaaatgcaacacagtagtcatcctgctccgagagcttttgaactgttgctgatctttagcacgtataacttgaatatattaaagagccagaaaataagatccgggaataaaggagagataaaaggtcagaggatgagtgtgtgaaggtatcacagggcaagtcactagatggggacagctgcttcccacagtctctgagaactagaagaaaccacagcagatgcagttttggttagaaataggaccaagtttcctgagcaggatgtttaagatcattaaataaatcaccaagggaactgtggaatatattcctctgctggtctttacaaacagagcagtaactgagcaattagggatgagttctgtttaagtctgaccactgtgctgaattggctggaatctctaagttccttccagcctcagagtctcacgatgcctcaccctcaccaattgcctgtaagagacagtggaacccagaaccagagggccctcaaggagttatcatgtaatcagtctctgacagtcaaaaatttgtccttacatttaatcaaacttccttggttgtagaatgggtacaggatagtttcctcctatcaaccctcatgcatggtaagccaaggttaccacattaaaaaaaatttttttttttgagacagagtctcgctgtgtcgcccaggctggagtgcagtggcatgatcttggctcactgcaagctccgccttccaggttcatgcc[222 bp omitted]tcatgctttcaaagctcctttcaaagcgactcttgtaaagttcacaaacctctaaaaactcagtgacatcccagtttgatatgattgatctgcacagatggattctacaatgccaagttctgggttctaagacaggaaacttaacacaacattcatgtttctaacatgcatatcctaaaggtgtctattaatactatagatatgaatctaagtcaccaagcacacatgtctgttgtcgggaatagaaggtaagagaaagaagtgacagattagttccacttgaggctatggaaagggctggctcccatgaggaaaagtgctggagggggagtgctgggcaaaaggggactcagaagtcacaagatgggtgggtggagggaaaagtaaatacaaatgcacagaagggcccttggaagagagaccttaaagggtgtttctaccactggtgctagagtaggtgaatcagtgggaagtatctgtggggcttgctgggctaagaggatgcagggtagccaggagggaagaggagatgtgggggagtggggcgtggaagcaggcaaacgaacgggtaaagaaaacctcattggttggtaaatggtcaaaaactgaccacactcttctggtttttaaccctggcaaccccgcctctggccctccctccactggaagtttccaagcatctgttcctgctgctgcctttcttctgctcccctgggctgttccctgtatcaagcctttcctcctttcctggaacttgcaattccactaaatttgccatatggcctagaaaaactgtaaattctggtggggtcgcgttgataattccttgttctccagaaggtagcagaggaccgagaattgggtttaaattaaaagggtggaaacttctataagtcaagaaaggaagtagccatttctttggacacttggtagcatatccactgccactttctagcatattttaaaatgaaaacttcttggtggtatattgaagaaataagactttcaaactctctctcccctgttcaattaattttgggaaatcaaaaatcacttccttttcacatccagaaaatctgattttgtcgaggcaattaagaatattaccattttactctagcaaagtaacccatgcagaggactgaagaaaatgaaaagcaacagtcccttaacccactgctggttcttttgtgcttgctttaaattgcttctacttttagctctttttatggtgaactccaaacactaaataacaggctgatattacctttctgaatttatcaacttcaatttatctgaaattatcaacttgatatatatccactgacttccttttacaacagacctaggttcatatcactaataacccctgctctcctcctcatctgtaatttcatcaatagttgtattacttcttgaccacattaaataatatatgtatcctttatttttgttccatcaacaagaaactctctctgtatttcccattttctaaggtgctgatgccagtatctccaccttccttccagcacttttactccccctcgcccacctcccaccagctatacttctacaccagaggctgaggctgcttcctttgtgacatctccaacactgatctctggattttacctcccaaagatgctcttttcccaagtaccccactctcagccagtgctactccatctacccagatgctccagccacaaacaaatcctctctttccctttcgcccacataagtcctgtcatttctacctccaaatatatttcaccatctccatggctaaaatgttagtacaagccactgtcttctaattttaggaccagccaccctcttgtcttgctataatccaccctccacaaaatggccagagtgatttttcagaaatataagtcagaccacatcaccccctttgctaaaaaaacctcttattaaaatccccttatcattatccacgaggccttcaatgatctggcctgggtgatctctaacttccatctcctatactcttcccttcattcactctgctccagcaacacaggcacttatcgttccactgtcacaggctaatttccattttagggcctttacttttctgcttggtgacatctcagatcttctccttcttctcgtcattcaaatcctaactgaagggtcactctctgacaggctttccatgttagcaaaagcaacctcttctccctagctatgctctttcatgttaccctatttcagcgtcttcacagcactccagacattatcttgtttgtactttcttagcgttcatacccctttctagaataagagccctttaagaactgttttgttcactgcctgtatcccaatcaccttctatgcgtggcacatacaaggcattgaaaaaatactgactattatcaactcggtgttctgtagccttaattaaggcttctatactttggttaagattaattctaaaagttggaaatcaaagaatgttttatttctgcaaacctataattattattcactatttaaataatgtccccaaatatgttctattttcttgcttggaacttacaattgttttttctcttccatggtctagaattgaataaaatcccttgaatccccgcatttcacaggtaccaatcatcagagccccgtgtcttcttgctctgtcagtctgtaccacagctgccactctatttctctcttgatttggatctgctacctttgactctcatgtcttcttctttcctgttttattaccttactttgctggaatatatcctcaggaaacttcacaggaaagggtgtgtgtgaaaggctctgactgtgctgtttttcttcttttttttttttgagggaaggttttggtctgttaccgaggctggagtgcagtggtgtgatcaccgcacactgcagcctcgaactcctgggctcaagcaatcctcccacctcagcctcctgagtagatgggatgacaggcatgtgccaccactttcggctaatttatttattttttattttttagagacagggccttcttatattccccaggctggtcttgaactcctggcctcaagccatccttccacctcagtctcctaaagtgctgggattacaagtgtgagccactgtgcccggtctctgaccatattttatcccttgtttattttttattattattttttgagacggagtctcgctctttcacccaggctggagtgcagtggcgcaatctcgactcactgcaggctccgccccccagggttcacgccattctcctgcctcagcctcctgcgtagctgggactacaggcgcccgccac[138 bp omitted]cccggcccccttgtttatttttaactttatacctgactgatactttggctgggaatagaattataggtggacaatacttatctctccgtactttacagaagcttgtcttttagcatctagtataagtgaagagaattcacatacatgtgcacagttgtatcactactagcaaagactatccagattgatgcacccaagatgaaattttgtaaagctagctaatttaaattaagtgggttagtctgaattatagtatgttgagtaaagaaattctgttttctttctttcaaatgtaaatagcgtctccacaaattcttctccaaatcaggctaattgtctttctgcaagtcttcttttcctaatcattttcttagtaaacttcttattcacagcatttaattctccttcatgctgctcatcaccattgtacttgctttcaattattcatttgaaaattcagtgtggtaagaaatagtatcttgcttattgctgtatctttggcacctaacttatgtagaaagagagcctggcacttctgagtgtgggctcactatacagattgagaaaacaaaagtaaaggtacacgaggtgcagctgaagccctctcaaagtcaagaagcatatccctggtgagctgtgtaggctccctagtcctaacatctaaaacagtggtttgcagggatcatgagctttgaagtcagaaaaactgggtttgaatctgtctgtgctcgccacttgctagctgtatgaccctggacaagtcatttatatgctctgaactctgggttcttcatatgtaaaatgaggataaatatgtctaccttgtaatacagtgactttgaaggataaataagacagtttatgtaaagttactgacataatcgtgggagctgatgggaagtatcggaagtattattgttattaataaaagcaatgaaatgttgatatacagaaatcaaacctaaagcactaattttgatgaaagaatcccaaatttatgtactgtttcacataatactaagcatgataaaaaacattctagagtaaaactcaaattattagcaggtatttaaataaagctacttttggcccagccaaacgttcttcctactttctgtagctccaatccgaggacctttgatttaccttgtctgtatatagctcaatccattaaaaaatcattaggcagcagcctcaggctacaaagccttacatttgatttcttttgcatcctttaatttactgatgaaaattttgaaagagtaaaattgaaattagtgaggctttattgaaagttcattacatccacaataaattttgcttggttaaataaaattttccatgtggtgtgattatatagtacaaggaaagagattttctggggtgacttatggatacccaccttattatcttagtcctatcagatgcatagtgagttctctatctgctcctttttccactttatgcagcgaatcccatggacttcaccccccattccctctggggtgtgtttctcctaactttgttttcactccattatgtttcaatggctcctgcttcttctctttggagtttgcctggatcctgcccatcagagagatgactgctagattgatgggtcagaaatacatccatcatacagactccagaattaccaagatgattctttgctcaactacctgtagtggcaatcaacctgccggggatagcattccatggcaacagaaaagaaaacatgggcttttaaaaggtaggttcctagtatgcttgttgttgagggagaatctttttgttttggtgtgtgtcaatcaatgccctcatctaagagatgtgacaacagtgaagatgcaaaaccacaggaacctcaaaaccactaaaagctgtatatttgactcctttttacctattaaagggaatccattagtagacttcaagaacaaaatcagagtaaaattagttcactcttaggtagatcaggggtgagtcaggagaagaaagaggaagcatgtcaaaatatctactatcccaaagaactttggagaacttgccagcttgctactctgccccacttgctatttaggttctaagcactatgactgatggcaagtttgtaaactacaaggttttatatttaaaggaacctgggtctcctgaccttatttctctatctaagaagcaacaaaggacagcatatttaggaatctgcattagaatcaactaccaaggacaatttctgaggacaattgtgactatctaactgtaatctcttataaaaggacggtgacaaggtttttaaagcagtacaaaactctaaagagaattctgtgatacatatcaataatgtatcacatactattcaggatatcaaaataaccttaattggactaaatcatatgatggtagtccatgtgcctaagaaatgtgtttctgtggtaacattcatattttgttaatctaatatcagctttgatttactactgcctctttttaaaaagggtcatttatttatgaatgagtgaatgaatgaatgagacaaggtcttgctctgtcacccaggctgaagtgcagtggcatgatcatagctcccggcagccttgaccttcccaggcttaagtgatcctctcgcctcaggctctcaagtagctaggactacaggcacatgccaccatgcccagctaattttttatttttaaatttttatttatctttttttcaaatagagatgaggtctcgctttgttgcccaggctgctcttgaacttctgggctcaaaagatcttcctgctttggcctcccaaagtgctaggattaaaagtgtgaggtaggctgggcatggtggctcacgcctgtaatcctagcactttgggagggcgaggcaggtggattgcctgagctcaggagtttgcgaccagcctgggcaacaggatgaaaccctgtctctattacaatacaaaaaaattagcctggtgtggcagtgggtgcctgtaatgccagctactcaggagggtgagacaggagaatcacttgaacccgggaggcggagcttgcagtgagccgacatcgcaccattgcactccagcctgggcgacagagtgggactcagtctcaggaaaaaaaaaaaaaagcatgaggtaccgtacccggcctaattttttattttgtgttttttgtagagactgggtcttgctacattgccagggctggtcgtgaactcctgggctcaagtgatcctcccacctcagcctcccaaagtgctgggactataggtgtgagccaccacaccctgccaggataagtgatttagaacagagataatatataatgtctaatgattaatcaacatttgtcaggtgctgagatgtttatttttatacctttccttttgcagaaaggatgcttttaggtttgagttctgctcttctgaacagatggctatcatttaactaacagcaatactgagctttttttaccaaggactcatagtctagtcacaaaaaaaaaagaatgtgatttagctttcactagtaagagttgaaaatagagcataaataagaatccaacagacagaactttcaagattcagatacatatttcttttttttttttttcttttgagacggagtcttgctctgtcacccaggctggagtgcagtggcacgatctcggctcactgcaagctctgcctcctgggtttatgccattctcctgcctcagcctcctgagtagctgggactacaggcacccgccacc[138 bp omitted]cccagcctcagaaacatatttcaaagagaccttagaggtagctattagaatgcccaggtttataaaacataagagatggctggcacaaactgcatataagagaatagcagaatacagctttgaaacctcatatacataaaataagttatgtggtaaaaatatttccctttgttaatggtcctaagttcttttattcaacccaccagaggtccaataaattgccatcaaatcatagagggtcacataggtaatgggccccaaggggcatggcatatcagattccctatgtgtataaggttaggaaactataccccatcttctcaggatcaaacacccacatttacaaggttactactttcacctgatagaataataacttcagaaccctgctcatctgggaatcagcactagctggccgagtttaggacatacccacagttagattttcaggttctcacctacagaacagatcctcggaactgggtttcctgaacttgtgcagtatgaaaaattagcttttgagtttgaaataacagaatttgtaatagaaagagataatactctaaagatcagactatacttccatttaatctttttattaattttagcatgcaatttggcttttaccctcaatgcttttacaaaaggtgctttcaaaggtcaccaaatcaaagggactgctctagggctaggtctcctttaatgcggaggcatttgaccttgttgtcttctttctgggagagtacttcccctaagtctcctcctgccttttgacctcccatttattacatgtaggaattgcctaggggtccatcctggccccttttcactctacatgtttccttgatgacttcctcctgctttggcgtaacttcagactcatttacattcccttcaagttccttgacaatctggtcatatctacatacctttctggtagttcttgccactcctctcaacacaatctctgatcttgccactctggactactcactgttttcagaacagtggcaatgttttttattttttattttcttttccctttttctttttttgagatagggtcttgctctgtcacccaggcgagagtgcggtggaatggtcacagctcactacagcctcagcctcctgggctgaagcaatccttccctgcctcagcctgagtagctgggactacaggtgtgtgccactatacccaggtaatttttaaatttttttgtagagacagggtctcaccatgttgctcaggctgatctcaaactgctggactcaagtgatcctcctgccttggtctcccaaagtgctgggactacaggcatgggcaaccacgtccagcccaatgtattttcaaatagttcctttatgtatttgttcgtgctgttttcttctatacacaattcatggccctgtctcacctgaacatccctccctatactccagattctagtcacttttattaaggcatgctttattaaggcatcactgacatacaataaactccacatatttaaggtatacaatttgacaggttttgaaatatatattatacctgtgaaaccatcactgcactcaaactatccattactccccaaaggtttcttgtgctgctttgtaattcctacttccttcccctccctatccactctccatcccaacaatgactgacctacttcctgctcctatggtttgtattttctagagttgtatataaatggataaacttttcaggttggcttctttcaccaggcaaaattattttgaaattcatccatgttgtagtatcaatagctcattctttttattaccgagtagtagttcactgtatggatataacagtttgcttatccatcttccaatgctaatggacatttgggttattcccggtttttggctattacaaataatttgatgtgaacatttgtgtatgtctttatatggataaatgtgtttatttcccctagataaatatctaggagtggagtggctggaatatgtggcagggatatgtttagcttaaaacactgccaaactgttcccaccatgataatataaaatgacaatacaaattattcaattaatacaattatccaaaatggacaaaccagttatccaaaaattatgcaatagagttaaatcctatcttaaggggaaaacattcagtctttcaccattaaatatgatatttgctttagattttttcacagatgtactttaccaggttgtagaagtccacttctattgttagtctgctaagaggattttttttttttttttttttttttttttttttttttaccagaaatggatgccggattttaaatgctttttctgcaaccactgagattgtttttttttttcagtttgtttatctggtgaatttttttttttttttttttgagtcagagtctcactctgtcacccaggctggagtgcagtggtgccatctcagctcactgcaacctctgcctcccaggttcaagcgattctcctgcctcagcctcctgagtagctgggactacaggcgcccgccaccaggcccagctaattttttgtatttttagtagagacgggatttcaccatattggccaggctggtctcgaactcctgacctcgtgatctgcctgccttgggctcccaaagtgctgggattacaggtgtgagccactgctcccggactatctggtgaatttcatatattgattattggatgttaaaccaaccttgcatgcctgggataaatcccacttggtcacaatgtattatcctttttatatattgttggatttgattagttattttataaaatgctaaattggatgcactaaatattgcttataattcctaaatctatgctcttaatggacattggtctgtagttttcttttcctgtattatctttgtctggtttggtatgaggcgaaggctggcctcagaatgagctggaaagcattatctccttttcaattttctcgaagagtttgtgtagaactggtgatatttcttaaatctatagtagaactccccagtaaaggcatctagatctggagtttcccttgtggaaaggttttaactatgaattaaatttctttaatatacatagagctattcaggttatctatttcttcttgtgtgagttttggtagtttgtgtctttcaaggagtctatttaatctaagctgtcaaatttactggcataaagttgtatcacattcttttgttacgcagttaatattgatagaatttgtattgatgtcacatttttcatgttgatattgggaatttgtgtcttctgcttttcctcatcagtcctactagatgtgtatcaattttattttggtactactgatgtttgctattgtttttctgatttccatttcattggtttctgttctgacctttcttctgctttctttggtttaatttgctcttatttttctagttccttccttccttcctccctccctcccttcccttttccttttccttttctctctctcttccttcctctctctctctctctttccctctccatgcccctctcgctctctttttttttcccgacagggcctcactttggctaccctggctagagtgcagtggctcaatcttggctcactgcagcctcaacttcctgggctcaggtgtttctcccacctcagcctcctaactagctgagaatacaggtgcacaccatcatacctggctaatttgtgtgtgtgtgtgtgtgtgtgtgtgtatgtgtgtgtgttttgagatggaatcttgctctgtcacccaggctggagtgtagtagagcgatctcggctcaccgcaacctctgctccgaggttcaagcaattctcttgcctcagcctcctgagtagttgggactacacgtgtgcaccaccacacctggctaatttttgtatttttagtagagatggggtttcaccatgttggccaggctggtcttgaactcctgacctgtcttggacaggtgatccacctgccttggcctcctcccaaagtgctgggattacagacgtgaggcaccatggctggctgatttttttgtaattttttagtagagatagggttttaccacgttgcccaggctggtctcaaactcctggactcaagcaatccacctgcctcggcctcccagattgctgggattacaggcatgagccacccatgcctggctttttctagtttcttgacataaaagctgagggcattgatttgagacttttaaaatctacgcattttaaaagaaaagcattttattgtcctgtatatttccatgtaagtattgcttcagcagcattacatgaattttgaaatgttattgttttcatattcatgaagttcaaaatactaatgtctcttaatttcccctttgacctataagttactttggagtgtgttatttggctcccaattatttaggaatttttccagggatctttttgctgttgatttctaattatgtttcattatggcagagattttgaatgcttttacataatatttactgtaactgtgacatgacccagaatatggtctattctggcaaatatgcacttgaaaagaatgtgtattctgatgctgttgggcagaatgttttataaatggtaactagttcaactcagttcaactcagttgatagtgttcacattttctatatgcttactgattttctattgacttgttctatcaattatggagacagaagaattgaaatttccaaatataattgtagatttctccattttcccttgttcgtttttgctttatacattttgaaattcttttagggccatatatatttaggtttgctatgtttccttcatgaattcacccacattacttttactattatttttaaaacagataattgttttttaaaaagatttaatcaacaaggaaaaaatcttaaaaatttgcttgtgtagctaatatttctagtgctcttctgttatttttggagatctatatttccatgtagtatatttttattctttctgaaggactttaacatctcttgtactgtgagtcttctgggaataaactgttttatctttcttgtgtctgaaaagtcttttaattcacctttgttttggaaagctatttttgcttggtatgaaattgtaggtagagggggttttccttcagtactttaaagatgtttctctattgctctcttgcttgcattgtttccaacgagaaatcctctgtcatcttatccttattcctctgtatataatgtgtctttctcctctagcaatgtttatcactggctttgagcaatttgaatgtgatatgccttagtgtagttttcttcatgattttttttgtgcctagggttcattgaacttcttggatctaagggtttatatagttttcatcaaatttggaaaaatttcagccattatttcttcaagtattttttctgtcctcctccttccttcggggacttcgcttactagtcctttatatataggccacttgaaactgtcccacagttccctgatgacttattcattttttgaaaatttatcttttctttgtgcttcattttggatagtttctattgctatgtctttaaattcaccaatttttagttctgtaatatctaatgtgctgttactcccagccactgtagtttaatatcagacatcatagttttcatttctaaaagttcgatttgagtctttttctttgtttgttctttgtttttttttttgaggcaaggtcttgatctgtcacccaggctggagtgcagtggcacaatcagggctcactgcagcctcaacctcctgggctcaagtgatctgcccgccccaacctcccaaagtgtttggattacaggcatgtgccacgtgccctgcttatttgggtcttttttgatatcttgcacatctttaatttttgttaaaacacagttgtaataattattttaatgttgttactggtgatttctaacatctgtggcagttctgggctgccctcgaactcctgggctcaagtgatcccccagcctcagcctcccaaagtgctgggattacaggggtgagccaccatgtccagctgtgtcctaccttttggggaccatcttcattctcgtatccagaacaaatactacctattttttatgatattttccccaaatctcgcttctatctagagatgtacttttacctctgtgctttaaaccactttctttatacttccacaaacttattatacatgatacatttgtttcccttgataagacaataaccaatggcaggaggttggtctttgcatccttgtgtctaaaatgtctgatatgtgactgaacctcaagaaatagatttttctggtttctatgatgctggccaaccaacactgacttttacattattcttttaccatcttaactattttcaagtatacagttcagtagtaatatttccactgccactgttgtgaaatagatcttcagaacttttttttttttttcgagccagggtctcacactgtcatccaggctggaatagctcactgcagccttgacctcctggcctcaagtgatcctcctgcctgcctcagcctttggagttggagtagctggtactacaggtgcatgccaccacaccctgctaatttttaaatttttttgaagagacaagagtcttgccatgttgctcagcctggtctcaaactcctgatcctcctgcctcagcctaccaaagtgctggaattacaggcatgagccatagcacctggcccagaactttttcatcttgcaaaaagaaatacatattttaaaggaatgaacaaatttggagctgtcttttgataaactatgggacaaaaaaacattgatttgctcaaaggcctatagctagctggtggcagagttaggactggaagccacattgtctgtttcctgtcaaatactcattcctaataggtctgttaattcaaagcatatgacaagcacagaaggccaagaatttccatgcatcaaagaagcctcagatgtggaaagttactaattctgatggcataatttagctaggctgcgcttgggttgttttcatttgtcttggttagcaagaaatataatattctttaacaaattgttctctcatttttttttcttttttctgacaaagagttctctgaatcatctggttctgtaaggtcgctttccttttctattttatatctaaatttcttttcttcttataccctcagattcttttcattttgtaaatgacattctaggcctggtatctttcttcctaagaccagatataactctttgcttcatttagtaatgattctgtcttaccagcgattgttgcatggggattttttccactatgaaaattttatgtgaatttactggctactagttgctttgtttctgtgagaaagggcagtctggccaggcacagtggctcatgcctgtaatccgagcactttgacaggccgaggtgggaggatcacctgaggtcaggagttcgagaccagtctggccaacatggtgaaaccttgtctctcctaaaaatacaaaaattagccaggtgtggtagcgggcgcctgtaatcccagctactcaggaggctgaggcaagggaatcttttgaacgtgggaggcggaggttgcagtgagctgagatcgcgccactgcactccagcactccagtctgggcaacagagcaagaatccgtctcaaaataaaaaaaaaaaaaaaaaggaagggcagtctaaaataaaatagtctcgtattaatgtttaaataattttttctggttatacaattaatacataacaattataggaaattcaacattccatatttttttgagacagctaaagaccaaaaataaaaaatattaagtgcaaaaaactttttttttgaccataaatatcatgtcggctacttcttttggtttcaaatattgaagaaaaggaggcttggaataatttctctacgtgtcaaggagaagctaaaggaagcaattgctattacctttttaagacaggttagaggacggtctttgaattcaatagaacaaacctttccccattgaacagagaagtctgggatttgcagagggtctggtaaggaatgcatgccatggagaaacacctgagcaaaccataagaattcgttttctgagcctttgtccatgttctaagctctagaaaatactatgtccctcatcctcttaaaattcagggggaaaaattaatctgatagaatgatctcttcctctcttctctggtggtaagtttctcatctccactctagtgttgcctataactgaaagtatcacagattctagcatcttggggacagaatgggcccagaggctttcctattccctatgtgtgcaaatgacattttgaacccaaagcagaattttacatttatatagttgtgtggtttcttctcattattctggtttgtcaagatactttgaatcctaacttgtcatcaaaatataagttatccttcctgggtttttcttatttgcaaatttgtaagtatgtcttcattcaagtcattgtttaagaaaaattgtgttagttttacccaatttcttctcactgaacttatgctttctttggttgctttttcccttctaagtacgtataaactatgacaattttagaattttgctgaaaatttatgtcaggttcaacaataattacatataatttttgcatctgtgttcacatttgcacaaggaaaacctttacctgccttcagtctcttggcccttttccactctccatgactgctcaaagatgtctgagagtgaatgggggttcatatgaagatgctttccagtgtctcaggatgtgagtcatctggcctggagtgtgaattaataaagcatccagcagtcctcttttcctagctgggctttaaattccctcttgatgcttgttcttcgtttcaaaaacttatttcttgatgggtatgatgaaaacaagtttctttaacatgataccattttctctaaacggtgatgtctttcctacccttgtaacaacaagcagtgctcctctctcatttttgttactagtttttccaagactcattaggttaggactctgttggatgcaagttacataaactcaattcatagtgacttaagcaaaaaggaaaagttgttaagaactaggacaattcactgagtaaaaagtaactcgccaggccaggggctgtggctcacgcctgtaattccagcactttgggaagctgaggtgagcggaacacttgaggtcaggggtttgagaccagcttggccaacatggtgaaaccccgtttctactaaaaatacaaaaattagccaggcgtggtggtgggcacctgtaatcccagctactcgggaggctgaggcagaagaattgcttgaacccaggaggtgggggttgcagtgagccaagatcgtgccactgcactccagcctgggtgacaagagtgaaactccgtttcaaaaaaaaaaaaaaaaaagtcacttgccaaatggtgaattcaccaaaagtcatctgctgaatgactagtttgccaaatttaccaaatttgcatatttaacaaggctgagttttgtttatccaatttttgttggacgaactagcagggtcaatggaggctgtgaatacctggggttcttgggccttcagcctctctcccacccttcagcctaccccttcttggtcccctagtcttcccctccctctgctcttcagcctcccttccctgtgggattggcggcccagatgcactgggcacagactctcctttcttcccttctctcctctgttccagctacttccagctgcagcagcagggccagaaacaaacggaccattccttaaactgttgttatgaaaacaaaatgaaaatcaatcaattagaactttgtagaaatcctcaaaggctattaattgccatctcacctagctgaattatatactttatataaagagtcaaaagaaacacatttttggtaaatctataaatttggtaaattagatgaattagtcatctggcaaatttgatagaagaaagctaaatatcaaatggaaaataacaaagaagatttcagaatttaggataagctaaagtccccataggaaatgctaaaatctgtggattttgacagttcctggttggacagtgtgtagagctaccttctaggaaaaatgtggatctgcatgacctgaaatgtaggttgcttgtttctgacagtcaagccctagtatctggcactgctatctgggaggaatccctttaagggcacgatgcctgataaaagacacacgtgcttgctagttctttggaagcatctgaaagagggatgtccttctctgatcgttcaaaataaactccaaacagcatacctgtacatttgagtgaagtccatttttttctgctccacttaataaaaagactaaaccaacccaagagccttagtttttttcatcctgaacatgtattaaaaagctgttagaagggacatattcaaggagttttttcaagactagtttttggtaacttcacaaatttttataacttccatgaactggtattgggcaaactgacttctggtgaactaatttttaaaatccatttaaaaaactgtggcaaaggctgggcatggtggctcagcctgtaatctccgaactttgggaggccgacacaggtggatctcttgaggccaggagtttaagaccagcctggccaacatggtgaaaccccatctctactaaaaattagcctgggcatggtggtggacacctgcagtcccagctacttgggaggctgaggcaggagaatcacttgaactcaggaggtggagggtgcagtgagctgagatcccaccactgcactccagtctgggtgacagagcaaaattttgcctcaaaaaacaaacaaacaaacaaataaaacaaaaaaaaaacccacaaaaaacaaaaacaaaacttgtggcaccccactgcccctgcaagagaataaaattcaccctcccaacaatttccaagtgtacagtacaacagtgtcatatttgtgaactgcatatttgtgaactggtttttgacaaattggcctgctttaggtcacacaaaatcaacaaacggcatacagtctgatggccacaaggtggccggcctcgtggggaggcagacctggggcttggatgtttcaggtcctgcttcaccttgagtcctgctgctccccgtgggttccctatgctctacgctgttctctcttactgaacccaacttctcacctttgggaacgtgttgagccacagctcccaaatgttttgccttcatgcatagaagaggcaatgaattataagtcttctctgatccaaagcccaaaaatcttgagggatggggaaagtggtccgggttgggtcagatactacctgtgccctgtactcagctctttccagggagtagggcaatgtaaggatgtggtgcctctcgtcggaccatgcagaagtgtgacaggggagaggaaggtcccagaagaagggattactggacagaccaaacaataaatgcctccacacccaagctccgcctcctcctcaatttaacatttccgtcattcacactgtcccttgagaatcttctctccctacgaacagctgtagaacaggaggaagcttctttaacttcgtgcttccttgctgaccctgaaggtaaaaatctaggtccttctcattctagggatttttattgctaattactaaaggggtggcaaaataacaatttcagggaagctacaaaagctaaagaattttgttatagtttttactccatgaggatttttgatttctggttttattactgaggtttaacacctgcctttgtaacttctatcttgctagttctttctctgttcaattaactctttttggcatgtggggcccacagatgtattacatatcaactagtgttcctcaagttcccacttcccttaagtgaaaaattattttgcattcttgagcatgtataggctaggtgacatctgtgtcttcaggctttgtcttgttgggcagttttatatttttatacttacttctccccattacttatatgataaagttcaaattcattggcatgggcttttataagcttctacttatttttccagtctcatttcttgctacagcccctttggtcccctgcaatcactcaactctccaaatgtaccagctccaccaagtttttgcatattctcctcccttctatggggagcatctcacctcatcccccagctcataacctccaactagacttgaagacccaactgggtgatcatttgctctgccagggatctcctgactctggtaggcaaagagggctggtttatcccctgtgtttccatggcctttgtccatggttttattacagtacataccaggcagtataatgtacatgctgtcttttcatgggattaagagctgtttgaagggaaaggactggaaaggaccacagggttcttcttggtatccctcctaccacccgcagcctgacctgtgatgggtgcttagtgaatgcatgctgaatgatggtataaaaatagaacagtgtttgtggcagataaaacacttcactgagtatattatgcttatataaactcctgattccaatatagctgctaagacctgaaataaacacattaagagagctttttaaaaattgcattaagttaaagagttatatctgacattcaatttagaaaaaaattccaacagatagcatggtattattcactaatcatttggtgaattcatgaatacctcacaggaagatctctgttttaacatatattgtaaggtttagagctacggcctttaaaaagtaatatgattactctaaaggtacaatagctacctgcggaaatgatgaaaagatcagttttccagtatttttggattcactctttcaacataaaagacaatgatgaacacgtcacaaagcaaataagaatctttgatttgcacaaaaatccccagaaaatctcccgtcatcaaggcaggtaaagctgaggatgactgtgcccctgcacaacctcttggtgagctctgcccaagggcagccgcttctcagtgcagatgggcaccgtgcacagggagagatggaaagtcagtggattgctcacagtacacaacagctgttacactttaacattgtttgatttttgccccagcttagtcacactgaaaaccttttaagatttctctctgtactcttttgtgtatagcaggtgggactgagtgcatgtaaataggttaagttcattatgtggaagcctgctctttgcaggtggagtttcctatctggaagtgggcaggtgggccctcactgcgaacttcttagggtaattaaaaaccattgcttagaatgacaggcggctctttctaggacaagtggatgtggtaaacaggatcctggttctgtgtgatttctctgtaatcctccactcaattctactctccattccttctttaccccttttctctgagcctcagccctctttccatcccgcctttcttcactggggcagtaggggatgtttcttttgcacttgtcagcaatttcaaaaacacaaatctttggtgatttcatcaaaaaaaaaaacaaacctactttcatcgcaatggcatcagcaaattggccatatgaaaacatgatgtgctccttctggtcattttctatgtcagttcatgaaaccagtggccatcaagcttgagcatagggatcacctgggtagctcactaagcatgtaggttcctggagggtctgatttagagggcctgggatgggcccggggagctgccttttgaaaaaacaccttcaggttattctaatgccgatggagcccacactttaaggacccctgataaagaaagactgtcatagtctttttcatggctgcatgctgcttaattgtatggaaataccatcaagtatttaatcatgtttgttttgatgaacttttatatggtttctaagttttcgcaattaaaaacaatgtgttttctctttattatatcttgcacacccttatgtcaagggctgactcaataatcacagcaagagagccactctgctatgtacaaaaccctgacccagaagcaggttgtccaagaatggtttagcaccaggttccccaggaatgtacatggaataattttatagccatcaaaaatccccagtgcttcacctttttaaccctccctcatctccaaacccctggtaaccacaggctttgccatctctatagttttaccttttccagaatgtcacataagtggaataatacagtatgtaggcctctcggactgtcttctttcacttagcaacatgcacttaagatggatgcatcaatgttgttgtgtagagttattaattgttcttttggatttatcctttattttacctaattcttctatgatttcagtttttacaattaactctttagtcaatttggtatttacaccaacaataattttaacaagcaaaaaatataaataaaattattttatatggtactacagtggtggatacatgacactgcatttgtcaaaatccatatagcaccttaaaaataccaaccaggaggggaggggatgccagaataagatggaactgtgagaaaacaatctagctgttacaaatgttcgatataacttatgtaaagtacaacaatgtaggggcaaggaaaaagacttactgacctaagtaataactctggaaatgactggaaccataaaactaaaaacaaataaaactgtatatactgtatatagcactgaaaaaaaccccaacaaaacaaaacaatgtgaaaccatttgtttttcttgcccagtaccgtatcacttccgcttctttcgggaaatgctggccccgtacacttcgtccccagtcactcccaccccactctgcttcactctcttccaaaacatgctcttcctcaggttttactggagacttccatgttcttggaagacaccacttctctggccaaagtgactgtcactggggtaggtgtcttacccatgccatgacaaccattactctggccagttattgagtcagtgggaacatttccctggggttttaggacaatagcccagagaacattctcttaatttccccctggtggcaaggctggaaaaggagatatagagttatttggagacatttccagccatgtggaagccaccactacaggagagtgaacctggcaagacaagagatgtgaagatgagagatggagattgtgacagcatttgactcctggatcacagctgttcctcctccagagagccccagtagcatgctttctgaggctcgtttgtctgctaaacacaaatgacaacttggttgggcatacaattgttgctctctaagcttttctccttagaagactaaagatgttgctccacaggattctggcatttactgctgcagtacagaagacggagggaatcctaatttttgttcctttgtaagagaatctcattccactcccaggtctgtgtgtttaatacatactttataatttcaaggattaactataaacatagttatatataaagaaaagttatatatattggctgggcgttggggctcatgcctgtaatcccagcactttgggaagttgaggcgggaggatcatgaggtcaggagttcgagaccagtctggccaacatagtgaaaccccatctctactaaaagcacaaaaaattagccgggcgtggtggagcatgcctgtaatcccagctacctgggaggctgaggcaggaaaattgcatgaacctggcaggcagaggttgcagtgagccgagatggtgccattgcactctagcccgggtgacagtgcgagactccatctcaaaaaaacaaaacaaaaccagttatatatattaaaagcagacatctattcagtcctggtgttcttacataaaggggcatatggactcttcggggctccttcttatagcccacttctttgtagccaaaatcatttctcagcttttaagctggagaattacatatatttagttaacccttgaaattaaaaaaggtcatcatgataacaaagtaggctctctggaacttcagaaaaagtgcattcagtacagacatattttctttttgtatgttttaaattaccatattttattgaatataagatgccttctctgtaagatgtacccttattttgtatattgctaagaaagttaacatgttgcccattataacagtaaattctgcacactgagagacttcaaactttcctttcacatcaattctattttctgcaatatcaactgtgccattttcagattttaatgttgatttacattttaaaatatctttccttacttcattcaaataattgaacacttttgtttgtttctcagccagcatcctcttcatctcagtttgccatgtaatcttgggcctgtttatgtagaatctatgctttcttgaattttattcagagtataagcagatggtttctgtaacataaattttatattattggccttttcagaaataggctttttcttttaggtcttataatatctatatctctcttactgttaatatcttcctttataggcctcccaactaaggagacatctattcagttctgatgttcttacataaagggcatatggattttttggggctccttcttacagcccacctgtttgtagccaaaatcatttatcagtttttaagctggagagctggcttgtgtgcacagactctagttgtggttgcaaagtcttctacttattatgaaactgctgatctgagtaggaattcctacatcctgcttccttgtcagctcactgacaaggagagtctgaaattatttctagttctgtagttgttaaagaaaagtgaatggaaagctgcagcccccagcattcaacatactcatggctcttccagcccacagcccttttagttgctgatttaatatcttgaaatgcctcctgccttctgtcccacacatattacattgcttagccctgtaatcctggaatcaatcaaggaaagagacattcatatggtggtatgaaggctggcaagtggcagggatagccagaagttggttaacggatataaaattacagctagagaggaggaatgagttctagcattctctagcactgcagggtgaatatagaaccctattctgtaatcttatctgtaatcggtcacaattaacaatttattgcatattttcaaatagctagaagagaggattttcaatattcctaatgaaaagaaatgataaatgtctgaggtgatagatatgctaattaccttgatttgatcattataccttgtatacaggtatcaaaatatcactgtatcccataaatatgtataatcattgtgtcagaaaaataacttaaaaaaaggaaaagaggtattcataaagggaaggaaactatcagaagaatttttcctttctttcatacaggagaaggattgagttaccatcttctggtgggcaaggtgcacctatcagtaggaagggctagaagcaccctaccgcgagtggggcctatcagtcagcaattctctgtttaacaatgagtattcaacagttatttacagggaaccttctgtgtgccagcactgttttgggcactagggaaactgcagggaacaatataaataaagtctctgcttacataaagcttgtattccagttggaatatatacaatacacaagtaaagatacagcatgtcaggtggagttgacagccatggggaaagattaggggggtttggggacagggtgtggtgggacagggtgaattgctattctccagaggacagtcagggaagacctggtgagacgatacatgagcaggggtgaaggatgcccctcttggcaggtccaggattgaatcacatttctagtttccagcactacagaaaggtgtccttgcttcctgtgttttcacgtgtatctctattggaaggcagaggaaagtgaattgtggccactcacttttctgtcccccataagtcaggtgccttcaataattattttaaatagctcaaataccctaaatttgatggaccaaaatttaatcaaccagtcctccacagctggcaatcgacatggcatacctttattttgcttatggaatataaactattaaaatgagtggccaggcattcaaagagagcagtctgggaacatagatcaaaggccatggaaacgggtattcaggtttggggcagaggagcctcactgcaggtgcagcagaaggcgtgagcagcagctctgctggacggggagggccaggcgctgggacctttgggaggtggccccatcctctgcctccttcacctcttgtcatgaggcctcacctcccctggctcctcacctgtactgccgcggcagtgacagcaatgtgcagccagcaactgctggcctgcttatcggtatgggtctccccatggctctaagtgtgagttataaagaacatacacaaactacaactgagaagctggtcgaatgttcagttaaatccagtaacagtgctcctttaattaaggagatattaaagaagaacaagaagcagatggcattgatttctggcttgcatccacagaaagagaacaggaaaaataagaaattttaatgcctgcaattggagttatactgaggtttccagcatccagacaggcaaatgcctggacagctgcttagggcagatgggtcctttgacagcttaatactgcagagtttctggtgacttcatagttagggcagccaacgtgagaccatctgtttagtagtgggcagaaaagctcagtaccagcaggtagctgctgctgagaatgaaacgcaaaccaaaagtcagccacactcaaaacctctgtaaaccactggcactacaaccacagaaaaagaaacctcaccttaggctaatgtgatatatacaacaagaccatacagaaagataatattccaagaggctatatttgggattgtttcaatatattgaaatgctatgagagattgttcacttggacagttcttctgttcttttctacttttctaagcaggaaagcaaaataataatgaattcagagaaaactagctgccacttattattaaaatgaaaaaattttagatcagtaacacatatattggtcgcagaaggtttaaccatgaaaaacaaataaatctcccttctacctctttctccctgtactgaggtgtctcagttccctctctagagacaaacactgttatctatttcctgaatatcttcccagatatagcctgtattatacataatcatatgtgtgtatacatatctatctgtacctatatctatacattgtttagtaggagaaaaaggcaaggtacagatggtatgtgtagcatatcaccatttttgtaaaaaaaaaagtcataggagatatctatatatctatctatataaatagagatatatctacctataatatagttatccagtgatagatacggatatcttccggtttaacttcttgccaggtgcttgtaatcccagcactttgggaggctgaggcgggtggatcacctgaggtcaggagtttaagaccagcctggccaaaatggtgaaaccccatctctactaaaactataaaaattagccatgttggcaggtgcctgtaatcccagctactcgggaggctgaggcaggagaattgcttgaacctgggaaggtggaggttgcag[131 bp omitted]attctgtaccttgcccttttttcctcttatttggaaatggttttatatcaatatagatagaattctcttgttcttgtattggtagcatttacaatgaacaaaagcatattaatgactcggagaggtactgcagtaaagaaacctgttagggccaggcacagtggctcacgcttgtaatcccagcactttgcggggccagggcgggtggactgcttgaggccaggagttcaaaaccagcctggccaacatggccaaatcccatctctactaaaaacacaaaaattagctgggcatggtgacacacgcctgcaattccagctactcaggagcctgaggcacgagaattgcttgaatacatgaagcggaggttgcagtgagccaagattgcaccactgcactccagcctgggtgacacagcaagactctgtttcaaaaaagaaaaaaaaagaaacctgtttgacttcattagcatatcccaaatgtatttgactttgggttttcccaccccatggtggaatttttgatttgtggaatacagcctggacttgctggtatcaggtgtttctggatggtgtctgttctgactggtctgtgcttgagccatactggttgttatatattcttaatgtcatcttttggaatatacaggcataacctggagatattttgggtttgggtgcagaccactgcaataaagtgaatatcacaataaagcaagtcacacaatttttttttggttttccagtgcatataaaagttatgtttacattatactgtagtctattaagtttacaatagcatcatgtctaaatactgtacatattttaattaaaaacaataaggaaagtgtgatttaaaaagaacataagcaaactataacagagaagccggttgaatgttcagttaaatccaatgagagtgctcctttaattaagcggatattaaagaagaacaaaaaatgctaaaaatactaatgatcatctgagtctccagtgagttgtaatctttttgctgttggagggtcttgtcttgatgttgacggctgcttactgatcagggtggtggttgctgatggcgggggtggctgtggcaatttctttaaataagataaccatgaagtttgccacattcattgactcttgctttcatgaaagatttctctatagcatgcggtgctgtttgagagcattttacccataataggatgtctttcaaaattggagtcaatcctctcaaactctgtcactgctttatcaactaagtttatataatattttagatgctttgtcatcatttcaacaacgttaacagcatcttcatcaggtgtagattccatcttaagaaaccactttctctgctcttccataagaagctactcctcatctattcaagttttatcatgagattgcagcaattcagtcacatcttcaggctccacttccaattcaagttctcttgctatttctaccacatctgcaataacttcctccaatgaagtcctgaacccctcaaagccatccatgagagttggaatcaatgttttccaaacttctgttagtgttaatattttgacctcctcccatgaatcacaaatgttcttagtggcatctagaatggtgaatccttttcagaaggttttcagtttactttgcccagatccatcagaggaatcactatttatggcagctgtggccttatgaaatgtttttctttcattttgttttttttgagacagagtctcactctgttgcccatgctggagtgcagtggtgtgatcttggctcactgcaacctccgcctcccaggttcaagcaattctcctatctcagcatcccaagtagctgggattacaggtatgtgccaccacgcctggctaatttttgtatttttagtagagacagggtttcaccatgttggccaggctggtctcaaactcctgacctcaggtgatcagcccacctcggcctccaaaagtgttgggattataggcgtgagccactgtgcctggccatgaaatgtgtttcttaaataatcaggcttgaaagttgaaattactcctttatccacgggctgcacaatagatgctgtgtttgtaggcatgggaacaacattaatcaagccttgtacatttccgtcagtgctcttggataactagatgtactgtcaatgcatagtaatgttttgaaaggaatcttttttttctgagcagcaggtctcaacagtgggcttaaaatattcagcaaactatgctataaacagatgtgctgtaatccaggccttgtgtttcatttatagagcacaggcagagtagattttgtgtaattttaagggccctgggatttttggaacagtcagtgagcactggcttcaacttaaagacactagctgcattagctcctaacaaaagagtcagcctgtcctctgaagctaggcattgaccttctcctctctagctacggaagtcctagatggcatcttcttccagtgtaaggctattttgtctgcattgaaaaatctgttgtttcgtgtagccaccttaatcaattatcttagctagatcttctgaataacttgccacagcttctccatcatcacttgctgcttcaccttgcacttttatgttatggagatgtcttcttttcttaattctcatgaaccaacctctgttagcttccacttttcgtctgcagcttcctcacctctctcagccttcaaagaatttaagagagtttagggccttgctctgcattaggctttggtttaagggaatgttgtggctggtttgatcttttatccagaccactcaaactttctccgtatcagcaataagactgtttcactttcttattattcatgtattcactgcagtagcacttttaatttccttcaagaacttttcctttgcattcacaactgggctgtttaatttaagaggcccagcttttggcctatctcagctttcaacctgcgttcctcactaagcttaatcatttctagctttttcttttcccttttttttttttttttgagacaaggtcttgttctgtcacccaggttgaagtgcagtggcacgatcatcgctcactgcagccttgaattcagcctcttaagtagctgggactacagactacaggtgtgcaccaccatgcttgactaacttttaaatttttttgtagagatggagtctcactatgttgcgcagaccttggtctggaactcctggcctcaagcaatcctcccgctttaacttcccaaagtgctggggtcgcaggaatgagccatgatacctggctcatttctagtttttaaaataaactgagagatgtgtaactctcccattcacttgaacatttaaaagccactgtagggttattaactgacctaatttcaatcttgttgtatctcagggaataggggagcctgaggagaggaagagagatgagggaatagatggtcagtggagcagtcagaacgcacacgacattgatcagttaagtctgttgtcctacatgggtacagtttgtggtgccctgaaatgattacagtaataacaaagatcactgatcaaagcccaccatagcagttaataacaatataaagttttgaaatattatgagaattatcaaaattgctgtggcaatttgttagctcctaacaaaagagtcagcctgtcctttgaagctaggcattgaccttctcctctctagctatgaaagttctagatggcatcttcttccagtgtccagagacataaagtgagcatatgctgtaggaaaaatggtgctaatagacttgatcaatgcagggttgccataaaccttcaatttataaaaaccacaatatctgtgaagtgtaataatgtcaagaacagtaagacgaggtatacctgtactttattaaagattgtcttcaaatgttttagcaaacataaaatatgtgggtgtgtacttggagaggcagaaataatgggtctggattgaataaagactgcaggaggtgaaagagagactaatttatacttagttggtttttgtttcaagattcatgtgaaaggaaatgccaggaaagttctggcttcaactcatggtgatgaggaaaaatttattcgaggacatgctttgtcttgttttgttttctttttaaatcatggaatatctcaaacatcagtgtatttttcatctagaagttcgatttgggtctttttcttacatcttccttatctctagttaacttataaacatctgaaatctagttataatgacttacaatgtctgtatctgctaattctagtatctttgtctgttctgggttggtttcaaagggatgattctccccctcataatggactgtattttcctatttgcatgcccgtaatctttgactggatgtcagacattgtgaattttacctgttgggtatggatatttttgtgtttttagaaatatacatgagctttgtttcaggacatagctaagttacttggaagcagtttgatccttttgggtcttgcttttaagatttattaggtggtaccagagcagcatttattctagggccaattattcccccctactgaggcaaaacccttctgaatactgtacccaattaccctgtgaatgacgaagttctttagtctgccttgttagatcagaaactactcctggctctttgtgaggctgggcactgttccctctggtcctcttagctggttcttgcctcagccttgggaagttttgagccctttcctcccaactgctgacaagaacacatctcagaatgtactttagggaaattatctggaagataaagaattggtctgaagttaattccctcccgaacctttggatttccataattaactcagggacaaataagattatgtgccacaacatcatgcttataaaatacaatgtgaatttcaatgtcatggcaatgatacgatagttgacaataaaggaaaatagctagaaaaaatcaaattaaccttttcccaaaaagtaaatagtaagttgatgactaaaactctaagtcaaaatttcaagcctgacttttctggggtctgggaggaaagattttatctctcatttccacttcactcttaattcataagatagaaacaccaagaattaaaaaaaaaaaatccaccaaaaaattcctagcatcttgatagtcttctcttcacatttataaattttaaagaaattaaaaatccttacatacattaaagatagaggacatacgcctagaaatgtacctcagcatgcatatgctagctaggaaaagaaagcaactgatgaaatctacatccaggttcacgtatttctgtcacttgtagaaggcacttaatagatcagaatttgctaaataagcacccagatagagataaaatacttcaatctcccaggcaaaaactcttgcattcattagtactggtatccaaattaagagtaacaaattaaaattcctttaattttctatactttgctataaatattagcaggaaaataagcttgcttatttgagttatag[135 bp omitted]gctccgcctcccaggttcacgccattctcctgcctc[221 bp omitted]tatttggcagatggaaaggaattttcaaaagtctatgcatttattattatttttggtaattactttcttattttttccccacaaatgaccattaagtattattttacttacagcatgtaaaagcatttaatgatagaaaatatttaaagatctactttgatctagaatgtaaggtgtaataacataaaataaatggtctgtgcagcccacctctaaaattatgctctatacatttatcagccaaaatgaatacaatagaattagatatgtggacatctgattccaaatatgtgtttgttgagagaaagagaagccacgtctaaactgaaaaaaaaaaacatactaataaggaatacttgattaattttaggaactcaggaaatgtcttttaggaagaaaaagtaactacacttgtatcatttcttagtcactgattttgatgagtggtcttctcccagcatcaggtggggttggggaggtgaaggcagcatgccacaaagagagcacttgactttggagagatacacccacccaaatactccatgaccccttatgggaagagaaatccaatctctgaaacaactccaataaataaccagacaaaatcactcccctgcttaaaattatccattcactggtccccatcactctcaggacctgctctctgtttatatttattatatcattgttcacccccctgccccaggtatcatcagggcttactatgaagttctcagattatgccatgttccatcatgactccatgtttctgcagtggtcactgcctctctcaggaattcttgtagtcttcatggacttgcaaaccatcccaaatctgccttctaatttgcttatggtcatagtggacacacaaactgattatacttggggtaaatgagaagctatgacgagaagaatataaagtaatttgtctatcttttggatttaattgcatttggatcgacagtggaataaaaatcaccatttagggaaatctctcattgttggttcagctggaggctggaaaagtagaggatcattcctaaccttgaaagtaagctgggatgctaattttaccttctgcgaaacagatgatttaagttgtccttatggagaaaaatagctcaatacattaaaattggcacaaaacaagctcagtgataattacgattaaagatttcatagatttaaaacgtgtcttagttacaaaaatcaaactttacctcttgaaatgattcaccagcactccaacaagttctccaattcgactctcatgggttggctgtttgctgaagaggcagacaatgaggtctttgttgtctttcgtatggaacactacaagttggtcctttccattggagacactcagaccagtcaactgcaaagagaaaatgcatggaaaactatttggatcattctcaaaagaatgaattaaaaaatacattttggagctgggcatggtggcatgtgcctgtagtcccagctacttgggaggctgatacaggatgatcatttgagccctggagtttgaatccagcctggacaacataacgagacaccatccctaaaaacaacaaaacacgtcatacattttctaagggttttgctcagtgaccccctgactttaatcttctatcagtttcacggaacaagcagatggaaggaaataataaagagcagaaatgaacaaaatttgaaatagaaaaacaatacagaaaaattaatgaaacagggatggttctttcagaagatcaataaaattgataaacctctagcccaaaacaaaaaaagaaggaagaacttattgccaatatcaggaatggaagaggggccatctctatagaccacacagacattaaaaggataatattaaaatatttggaccaattctatacaaaaacttattcaacaacttagttaaaaccaaataattctggcagggtgcagtggctcacacctgtaatcctagcactttgggaggccaaggcgggcggattgcctgagctcaggagttcgagaccagccttggcaacatggtgaaaccccatctctactgaaatacaaaaaaaaaaacacacaaaaaaacattagccgggcatggaggcgtgcgcctgtagtcccagctacttggggggctgaggcaggagaactgtttgaacccaggaggcagaggttgccgtgagctgagatcatgccactgtactccactccagcctggtgacagagtgagactccatctcaacaacaacaacaaataattatttaagagtcacaaaatactaaaactctccaagaagaaataacttgaataattctgtatctgttgaagaaattagatttatatttaaaaacattttgaaaaagaaaattctagtcccagatgatttcaatagtgaattccaccaaacatttaaagaagaaataacaccaattcaccatatttcttctagaaaataggagagaagggaacacttcctaactcactttgaagctggcattattctgatatcaaaaataaacacaacagtacaagaaaactacaaactgatatccttcatcaacacggatgtaaaaatggatgtcaagaaaatattagcaaattaaatccaacaatacataaaaatgataatacaacatgaccaagtggagtttatctaagaaatgcaaggctagttaggtattcaaaaattaatcaaggtaatgacagaataaaatgacaggataacaaagaaaatccacagattgtatcaagtgacacagaaaaagtacttgacaaaattcaacatctatccatgataaaaatttctcagcaaaccaggattataagggaacttaacctgataaaatgacatatacaacatgccacagctaacatcatacttggtgaagaaggactgaatgttttcccttaagatcgggagcaatgcaaggatttccactgtcactgcagctatgcaacattatactggaagcc[137 bp omitted]tatggtgaaaccctgtatctactaaaaatacaaaaattagccaggtgtggtggcaggcgcctgtaatcccagctactcaggaggctgaggcaggagaatcgtgtgaacccgggaggcggaggttgcagtgagttgagatcgcgtcactgcacttcagcctgggcaacagagcgagactccatctcaaagaaaaaaaaaattaaaaagcatacagattgaaaaggaagaaacacatgtctctgttttcagattacatgattgcctacatagaaaatgccaaggatccacaaaatagctcccagaactaataagcgcatctagtaaggtcaaaggatacaaggctgacatacaaaaatatttctatattagcaatgaaaaatttgaaacaaaaattgaaaaacaaaaccatctataacaactccaaaaacaaaaatacttagatataaatctaacaaaacatctatctgtaggacctacatgttgaaaactacaaaatgttgaacaagttaaattaaaaggctgatgaaaggaataaaagaaaacctaaataaatgaaggaaaataatatcctcatggactagaaaacccaaattcttaagataccaatttttcccatattaatctatagatttaatgaaatcccaaccaaaatcccagcaagattttttgtaggtatcaacaagcagattctgaaatatgtatggaaaagcaaaagaactagaatagccataacagttttgtaaatgaagaataaagttggagggctcatagaggctgattttaatgcttagtataaagctaggttaatcaagacaataatttagaaaggaaaaaaaaaacatagatcagaaacagactcacgtgaatatggccaataattttttcaccagggtgcaaagacagctcaatgaagaaaggataatgtgggcatctggataacttggaacatttggacacccccatgcaaacggaaataaaagtctacctaaatctcacatctcgtaaacaattcagagtgcactataagatcgaaatgcaaaatgtaaaactagaaaacttttaggagaaaacatagaagaaaatctttgtgaccttgggctggcaaatatttcttagaaatgataccaaaagcacaatccataaagcaaaaaaattgataaattgaacttgatcaaatttaaaacttttgctctaaggaagacactggtgggagagtgaaaagactagccacagactggtagaaaatatttgcaaaaatgtatctgataaaggacttgtatttagaatctataaagagctcttaaaacttgatagtaaacaactcaattaaaaatgatggataaaagatttgaaatcacttcaccaaagaaggcataggggtgaataagcacatgaaagggtgctcaacatcagcagccattagggaaatgcaaactaaaactgcaatgggaaccactgcaaacccatcagaatggctaaaataacaaaacagcctacaacaacaaaagagtgataatactaaatgctggtgaggacacagaacaagtgggactcacatgcatcattggtgaaaatacaaaatgtaaaatgttacagccactgtggaaacagtggttgttaactcaaaaaattaaatggaaaattaccacatgagccagcaatctcactcctaggcacatatcctagagaaataaaaacttagcttcacatgaaaatttatacatgaatgtttacagcagctctactaataattgacaaaagctggaaacgacccaaatatccagcagcatgtgcacggataaacaaactgtggtacatttaaataatggaacgctactcagcaatgaacaaactaatgatacagattactgacatgcaacaacatagataaatctcacaggcattatggttgaatgaaagcagccagtctcaaaaggttacagcctgtgtgacgccatttatatgatattctctagaagataaaaggataaggatggacaacagatcagtagctgccagggtttggggttatgaggagtccgatacaagggagtttttggggtatggaactactctgtatcctgactgtggcagtggttacacaaatttacgcccatactaagactcaagagacctgtacaccaccacccatgcacgtaaattatattcattgcctataaatttaaaaaattgcacaccctggctgttttgatctctagatattctactttggtcaataaagcagaagtcagagtgatttcctcattctgtggtctgttcttctattgcataaaataccgaagtgccacctcctggctaccacaggtgctatcagccaggcgggcaggcagcatgaacaaggcaaccactgggggatggcgcagtgccacacggcctgtggtagggacagacgtgcagaagatgctgagaatgtgatccctgttcttgggggattcacaatccagttggatcagaggaagaggtaagtattaaataactgaagaaaaacaccttaacaatttacagatttgcagtgtcacttagttccatgcctatgttttacagatagaaattgagactgaaggagttcagcccgtctgcaggcccgggaactagaactcagacctgcagactgatggggactcatgttctttccatcacaccaggtttttcaagtatcatgtataaatgaacatagaatatttatatattctataaataagtattcccatgaatacattttcataggaggtgagttcttgggttgattttaaagaatgccagggtcagggcttaatggagagaagggaaaatattaaagaaattggaaatcattcaccaaccaatgtggatcgtgggctttctgaggccattggtaagagaatatagcaaactctctgccacttacatgtactggatccagatgatttttatatgattaaattaaaaatatcattttcattttaaaaaaacattttatgtctatcacgcttcactctcatttcattattttatatgtgaaattcaaaattgaattgatgtagcacttcacaggagagcttgattaaagcctaaagaaatgagaatggtaacagcagtaactctgccagcatatcccaggagcattagctgcaggggttcagggaaaagagacagattcggcaaagaacgctgaaaccacagggatagaggatcccttcctaggtgctacctggaccagaggacaggagccaatgactctgctctcggccacaaccccctctcagcgggtgggcttctctccctccccttctctctcccttgctgtctaggtggctttatctgctgtggatgggaattcttcatgtgtacgcccaggcctagtggtgtgtcagtctcagaagaaatgagggaaaacagtacttaagttgctctgctacacaaataatgaaagattaagtccctattgttgccaaagcaggacaaacagcacccagaacgtcccctttagttctggaagaaaggatggtaagtggggattagtgtactaaggatgacctgggtgttaatcccaattcagccatgtgatcttgagtgactcatttaatttattggggcatctgtctccttttctgcaaaataaggataacatcaggtgccttgtctaccttgcagggttgtggtaaggatcaaatagtagcaactctggagtacaaaaagtaaataagcaaaaaaaccctctgtcttcgagggtcttacactctaagtgaaaataagtcagcaaaactttatcactgaaaatataattttaaaaccttacaacaccatgcaaatggaaggtattttgtgaaacacctcagctggggaaggggtcactacctcattgcatttgggcagccataacacatagatgcgtttctccgaacaaaagggaaactccttatcaaggctccccctgcccctgttgcttccttatttctcctaatctatgagatttctatgctatgataaatctaagccttccccttctttggccttgaagatttgaacagggcaaaaagagtctctgattgcaacccatttcaattctcccagcctctccttactaagaaggaccaaacagtgaacacaactagataggtaaagagctgagcagttctggaagaggaggccggcctgagaaatcagagcagatgtcctctcctcctctgcaatggaatgagcgctagagagcagagctcactatacaagaaaatctctaatccatattctcatttacgaaatcagcgcaaaacagaccgatattagaaagagaaataattcgaaaagacaaatatgataaattacatacacaatggaagcagtaactgaatagatactttagaaaattaaagaataatagaagaaaacatcccagtctttagacagaaaggaatcacaggtaccagccaaacttagaggatcttctggatgtgtagcccagagaagttttagacctgtagaataaaggaaaaaatcttcaagtacctaggcatacaaaaataagttatctacacaggaaaataaaattcaggtttatatccttttttaaaacagaaaacttggccaagtgtggtggcttacaccagtaacctcgacactttgggaggccaa[133 bp omitted]ggggcaggagaatcacttgtatctgggaggcagaggttgcagtgagccgagatcatgccactgccctccagcctgggcactgaagcgagactccgtctcaaaaacaaaaagaaaactctattaattttgtcacaattcacaggaggagataagtaaatccattttattcttgatatcaattaggaaagatcagctcaaatatttaacagtaatcattaagatgaaaaaggatgtgtaaggttctaaccagtagtaaaaagagaataaataaaacttgaccaatgcagcaacagaaaaaagaatgaaatagcgtgggagcataaaaaatagaaagcatttaaataacacgattgaatttaagaaaagtttttttgccagttgctgtaagaaatgtgaacaggatacaactcctttattggaggacgaggggttatagatttaagcaaaaaacaaaaatataccctgtttataaaattaattaagataaaagtagaagtttatgaatgagaacaacatacataataaattaaagagctggttctttgaacagaccaaacccttggcagagtctcaccaaggaaaaaacaggcaaaaccgcaaatatttaacattaggaatgagaaagggatttaagaaagggtgtgttgactttcaaaattataagaggccaagagcagttgctcaagcctctaatcccagcactttgggagactgagacaggaggatcacttgaggccgggagttcatgaccagcctgggcaacatagcaaaaaccccagctaaaaaaaaaattagctggagctggatgtggtggtgcgtgcctgtagtcccagctactcaggaggctgaggcaggaggattgcttgagcctaggagtttgaggttacagtgagctgatcacgccactgcactccagcctgggtgacagagtgagacccatctcaaaaaaaaaaaaacaaaaaaaaaaaaaaaagaagaagaagaaattagaagagaaaaacttttgtaattgtaatttcatattaatgaaatgcatatttttttttaaagatgtggtctagctgtcttgcccaggctggagtgcagtggcacgatctcggctcactgcagcctctacctcccaggctcaagcaatcttcccaccccagcctcccatgcagctgggaccacaggagcacgtcaccacacccggctagtttttgtattttcagtagagacagggttttgtcatgttgcccaggctgtcatgaattcctaagctcaagtgatcctcccaccttggcctcccaaagtgctgggattacaggtgtaagccactgcaccaggcctgaaatgcatgattttataggaaaatataaattagtaaaattgacttaaagaaagataaaacaattaatttctatttataactagcaaaaagtttttttttagattatcagaaaaatactcttctagttcttactaggcacaggttatgttataggcccaggtaatttctatcatacttaaatgctctacaatatggaaaaagagaaaaatcatactgactcattttatttatcctgctagcaaaacctgctgaatctctctctcatacacaaaaacaaacacacccagaaatcaatgtaacgtacaaatacagatgcaaaatccaaaataattaacaaactggatgcaacaagataaacaccatgaccatgagcgtatattcacaagggtaagggtggttcactagtaagaaatacctcaatataggccaggtgcagtggctcacgcctgtaatcccagcacttttggaggccgaggtgggcagatcacgaggtcaggagatcaagatcatcctagccaacatggtgaaactctgtctctactaaaaatacaaaaattagctgtgcgtggtggtgcgtgcctgtaatcccagctactcggggggctgaggcaggagaatcgcatgaaccaggaaggcagagattgcagtgagccgaaatagtgccactgcactccagcactccagcactccagcctgggcgacagagcaagattccatctcaaaaaaaaaaaaaaaaaaaaaaaaagaaatacctcaatataactcagtttatttattaatagttcacatttatgtattatccgtgtgcttgtccaaccagaatgatctccttggggtcaggctcgctggctttcacttttttcagccaagtatgaagttttgcatttgtattgtttttattttacagtataccatggtatataaaacaatacttcattttacagtaagatggtaaatactcaaatgtatttattgctatttcatcactataataatgttttaattttttttttttttttttttttaactctggagcatctttgttccaaacttcctcccagtagcagctgttccacaatcttctgtcctggagaatctctcctcttctttggttactgctctctacatacacctctaagggacttcattcttggtattccccccacctccctgcccttccatgcccccgccccccacaccccgtccaaagctatgcctgacacacaaagaactttcatgaaattgtagcggtcacttaatttctgcaggtgtttgctcgtattttgacacagacacttgggtttttggatgtactattcaacttctgttctttgattagactgcagagataatgcttatgttcttttgatctcaattaacaaattgatttggctgctctttgatggagaacattctgttcattctgttttccattcagaaacttgggagacagtttgctctggctttttgcaggacacctggtgactttcttttcacctttctctgttctgttcatctgtctctcctaatctccctccttctcccttcccagtcccccacatcttgttccctccttactcctcaactagctataactcaggaagctcagctgtgtgggctcatcatggaaatggtggaagctgtggcataactgagagtttatccctttataagcaagcatctcttgaaagcaacaacttgcttgagcccagagccctcatgcaagcaggctgatggtcttgaggtgccatgccgtgaggcagccaaacctctcagaggggtcgtgtgcaggtgctctggtcagcagtcctggcttgagctctgccagccggggccagacaagtgagtgtatgagggctccagtgattccaactctcactcaccaagtaacccccaccttcgaatcttcctaatggaggccctagacattgtggagcagaggcatgctggcctcacagtgcctctttcaaattctttaccaacagaatccaagaacataataaagtagcggtcgtttcattccactaagtctggggtggattgttacacagcaatagtaattggaataaaaatttggaacaggagtagggtgctcctataacataatcccagatagttggcactggctttgggaagtaggtggaagctggaaaggttctgagagactgttgggggaatcatggcaggccttcaagaggaggtcagtgagggcctgaggaaaacagggaaaagactacttcgagccagaggaaagcggacctttgttaaggagaaaatttgacaacactgttgcctatgggaaggcagaaaatagaaaatgtacgtaacaaatgtgatgatctagataaggagatttctagacagaatactgaaagtgccatctggcttcttcttgctgtctatgaaaaaaatgtgagaggagagagaggaccttaataaagaatggttctgctctcatgtaaaatttagaggaaacataaagaagcctgcaattgctaggcttgaaaataaaactgtttcttattcccagcttctccagatggcaaatgattctcaaattaagaaatggtttcagggcaacggatcaaacccagagtgggattgtaaaatcctttgttaaaaccttagaaagatcgaaggcatccatagtatcttccagacagactaaacgaggctctaaagatctttagggcatgccttacaaattctatccgataaacaacagggctcctgaatcttaagggtcttgtcccacaatagctcacgaggagcccaaggtatgggagagtttattttgcagagatttgtgggcgtgttttttgtctaatggagtgattataaattgatacacagtgaaaccatcaaaatttcaaaggactggactgaaagcaacatagacatggcaaaatgcaaagaggctctggacctgtggacaggaagcagctaagaaagctacttagttgcaaacacagatggtcagtgagtgttttgtgcccctcattcccctcctctttgaacagaaatgtctgtggtaggtatcccacccctagatcatcactgcatgttgggtatgcggggcaggtaacttttccttttagttggtcttcagattgcaggaactctacttaaggaactgtgcctggattgaattagatgagatcctggcccttgaccttaaacctggtattataaggagatgagacttttgggacatcttgggagtgggtaagcacattctagtttattttacttcatttttttgagtcagggtctcactctgttgcccaggctggagtgcagtggtgcaatgatggctcaaaccttgagctcctgggctcaagcagtcctctgcctcagcctcccaagtagctgggactacaggcatgtaccaccacatctgactaattaaaaactttttttttttttttttggtagaaatgaggtcttgctgtgttgcccagactggtcttgaattccaggcctcaagtggtcctcctgccttggcgtccttaaagtgttgggattacaggtgtaaccacagtggttggctggtaagtgcattttaagtaagagtaacaaaaataatttttaatcagcgggtagaaagtggaggatttaaaacaagtttgcaaaatttttgccactcctcccatagaaagatagaggtctatatcctcaccccttcaatctaggcttactatatgactggcttttgacgaataaaatgcaacagaattggggctgtgtgacttctgaggcctgctcataaaaggcaatgcagcttctgcctcgtttaatgggacactcatgttttgagcactaagtcagctcataagaagtccaactaccagccagtcgtggtggctcatgcctgtaatcccagcatattgggtggatcacctgaggccaggtgttcaagaccaggctggccaacatggccatttctattaaaaatacaaaaattagctgggcatggtggcgcatgcctgtagttccagctattctggaggctgaggcacgagaattgttgaacctgggaggcggaggttgcattgagctgagatcacgccactgtactctagcctgggcaatagagtagactgtctcaaaaaaagttaataaaaaaaataaagaaggctgactaccttgaggccaccatgttgtgaggaagccaagcatctccaaaaggcctcataaggctctccggtcagcagtttcagtctccgagtcctccccactgaggtgtcagtcacctcagtgaacatgccttcaaatgattccagccccagcccttaaatcacccctagtctttaagtcttcccagctaaggcctcagatactgcagagcagagagaagccacctgctttgctcttttttttgagacggagtttcgctgttgtctgttgttggcctgggctggagtgcaatggcatgatctcagctcactgcaacctctgcctcctgggttccagcaatcctcctgcctcagcctcctaagcagctgagattacaggcacccgccaccatgcccgggtaatttttatatttttagtagatatggggtttcaccatgttggccaggctggtctcgaactcttagcctcaggtgatccacccgcttcagcctcccaaagtgctgggattacaggcatgagccactgctcgcggcccacctattctgaatcactgacccaagaacatatgacagtaacagagagaaaccttaattttgtaaatgcatcatagaaagaatacattgtttgggataactaagaattaattcctttataaacagacagtcactttcaaaaattttttgttattattttaacacatcagataaacagtaaaaataccatatttataaatattttcccacttcatgaaacagaataaaattcttttcctttcttagggattcaaagttgttatggtgaatgttaattagtaagtatgctttaaaacagatgcatcttcagggctactaggctctctgtgactgcacgcctggatcacatgatccaaacatcataccagtatgtgtgagccacatgctgttttaatggtaaaacaaaacctatttctacaaaacatgagctttgagcagtaatgaaaaactgtcttgaaaccagtataatcgactttattcccaagtgcttgttgtgagcctagtactattgatcaacattattcaggtcaaggaaaataattgtaatcaactgattaaaagggctaagtttatatcattgattgacaagggctttcaacccttgattttaacagcttgatgaaagccactcagcaaaactcttcagtaagtttccaacaccaattcacctcactgcactgaataaataaaacatctccatatcaaacttcaatttcttcccaatattccacatcctgacagggatcaagggcaccatcaagaagaacatttacaacccacataatgttctcatcacagtggatttggtacttaacaaaattaaatacaaattcctctagagagtgacacacaggaagctgggcctcccatagctgcctctgttaattaattaattaattctttttttttttttgagacggaatcttgctctgttgcccaggccagagtacaatggcatgatctcagctcactgcaacctccgactcccgggtttcagtgattctcctgcctcagcctcccgagtagctgggattacaggcgactgccaccatgcctggctaatttttgtatttttagtagagacaaggtttcacc[135 bp omitted]ccttttgttgcaagaatcttgtcttctttttgttaaaatctaagacaagccagatacttccctgagtatctggcagtttgagttcctgggctcgtcttgtaacttggagttcagtagtttcacgaaaaattcaattttaatcccaaatagactgctctgaggacatagctcaagaaatcacttcaacaagtttttaataccaagccatctagtggaactgaactaaatctctgagtcttcctatactttcagttttcatatattgcagtcatcaatatgcctgcctgtgtaagatgctgacttccttttaattactgcttcagatttattgttttgggcttgggaatgagataatcaaattcatcacaagggtacataaagcaagacaaatggccaagaaggcgctcctttggaaagaacatacaaagtttaccacacaaactctgtcccacctattttgactctgtctcatctatttgggaggtataaacatcctcccattttccttctgattatggttcttttgggccaatggctctcaaccatggctatgtatgagaatcacagggaagactgtgatacatttggtctggtttgtgctgggcatctgcagtttgtaaaagctccccaagtgattcaaattacacgtaaccattgatttaggtaaaactactaaataattgggtcctagatagtcaaattattattttacaaagctaattgttttactaattgaatcaagctctatattatctattttaaatttattttttcctctctcttaaaataccaacttaattaagctgctttccttattagtctttaattgaatttttttgaccctctcagtgcaaaataaaaaaagattattcactcatcattttaggcttattttccttatcctattctgagtcggtgtgcaataacaactattttagatatgatgagtgattttgtattgtatcctggtcattctggatattgtgttaggagactctggatcttacttaaatcttctcttttagcaggcttccactaaaagtgggccaggagcagaaggtgaggacaaatactttactgccggatgggagtggaagtccaggcccctcaacatggcttccattgacaccgctcttgtggggagtatgacaggcgcctcatagcctccaggagtgggtggaaacctaggcatgtccctctgcttccactgacatactgagaggggttgggtacctcattacccctaggctggctccccactgagcctccttgacaccagcccagcagggaagggtcaggagaggggtacctctttactgccaggtgagggtggagggctaggcttttcactaggcctttgctgatgagaggtggaggtatctgcatattttccccctggtgcttttctggagaagggtgcttattgtcaaaggattctgttttgctaggttacccctttcttgtacttttggcaagaaagagcaggctcttctctgtgcctgctggtgtttctggatggcgggcttctccagcaggcagtctgggatagaaaggaggcaaaaagaaaagccagggaacccccccctgccaagttcctccagagtcctgaggtccctagctggtccactttcctctctccagcattcagaatcttcttaaatttgttttatgatataatgtctagggtttttagctgtattcagtgagacaggtagggagaaatgcatctcttccattttgtttagaacttgaaggcccaacttcttattctagataatgccccaaacaaatcagaaatgtagtttctcctgcagtggtttctgatgtagggggaggagccaggaggcaaacatcacaggctggagcacacactccttttaagaatttgaaaaaagctacgagagcccatcgcaaacatacacaagtatttgcatatacacattgagtataccttatccaaagtgcttagaaccagaaatcttttagagtttgcattttattcagattttggaatagttgcatatataatgagatatcttcaggacggaacccaagtctaaaatgacattcatttatgtttcctataaatcttatatacataacctgaaggtaattttatttttcccttggggacgttgaataagctgtgctgtgtgcctgcgttttcactgtaacctgtcacatgcggtcagatgtggaattttccacttgtggcgtcatattggtgctcaaaaagttttggaatttggagagttttggattttggattagggatgctcagcctgtacgtatgagcctcctcaaacgtttccttgtcctgaaaagccatttctgccatattctgcaccctctcatagaacttcatgctcacctttgcttttgcatttaacaagctgcactgtgattatttttgtttgcatttgcctctcccactaaacgacaagcagaagctgcatcttctcgtccttatttccctccttacctgccaggtaagtggtagatgatagaatttattgaatgtgtggaagacagtaaaagctatggatggattaaaaaggttctcctagcttagaagactgatggttcccatgtgttccttatcaaagccaacccttaattacagccttaaaagctttattcttactggttaccttgcaggtactttctcctttctctcctcatgcccctccccaagctcttgtccacggcttccaaatccatgtctctgctaaggactgagaatgtctgtgacctcccatatgttgaaaccctaatccccagtgtgatggtatttggaggtggggcctatgggaggtaattaggtcatgagggtggagccctcatgctgggattagtgtctctataagaaaagacaggccagaacctgcttcctcctctcttccccatgtgaggatacaatgagaaggcagccagtcctctgtgaactgaaaggaaagccctcaccagagctcaaacatgctggcaccctgatcttggacttccagcctccagactgggaaatagattcctgttgtttaagccactcggtctgtggtttcttgttacagcaccccatgctaagacagtctccatcctaggttgctctttgactgtgtattgggccttgcctcaaatgaagcccatttgagactgacctttctcacactctgctaccacatccctgcttcttttcctgtatttcccatcttggtgagtcaccagcaccaaagcctgttgttctcgcacataaacaggtcttgaacccatctccccctctttatggtccttgcttgagtacaggtccttgtaatttcttaagcagcatcttaactgcttttcctgtcaccagtcttgacctctccagctcaaccatcaacactcatttattgaacacctactgtatggcaggcagtgttctgggaacaagagagtccccgacccttctcccatggagtctatgttctaatgggggtgtgggggagccagactgaaaagaactctaataatgtgacaggtggtgatgtggcctgtgaagaagaataaagtgtgtaaaggcatacagagggataagatggagctgagggtatcattctgaacaagccttttaaagttatatttgggcagaggcctgaatgaagtaaggaagccattcagttatctgggagaacactccaggggaatgaaaaccgagatcaaagattagacagtgagggcactgaaagctgacttcatccgactctgatttctacaggcatgggattgccagtttgcaagggggcaaagagcagtttctaattctagagcacctgactatgtgataagaacgatgctgaggactttccacgcattatttcatatacctcattttgggcctcaacattcaactgagatgggtgctactgttaaaatggggcatgaattcaacaaccacccatctgcttccaaatatcctaacacttgtgttgccagaccccactggggtgtgatttttcttttgtcctttaccatttatggtgtaatgatctttaaatgcaatataagatatttttacaactcaacaagatttgtgaaaggctatcagaggggatggtaagggcggacatcagaggtggctcccaagaagcagaatggctgctcaacaggagccaaagtagtagttcagctaactcaggagagaggaccctgagcctgtcaactttacttgttcccactagatatacctctaaccatggcacactgtaaagaggtctatgcttagatatggttccaataaaatgaaatccttctaatgtttattatattaaaaaaatcagattccccctgtagtgcagaacttcatcgtaacaattctgtgtaaagaaagtttgttctggacctcagccaataacaaagaaacaaactcatttatttaatggctacagtccaggaccagtataggccacctcccagtggtatgtgtgtggtagtggtggggatggggggtcgttgctaagtgagacaatatatgcagaggtccactataaggaatgaaaatcatcaaatataaggtgatttctttatcttatactactcttgtttaaggaaaatcttttgatgagactgtcctcaaacattaaaccatggtcaatgacttaaagaaaatttaatttttgatacagatacgcgatcatgaggctttctagaaaacacacactctctccaactctgtctcagtccatttaggtggctatgacaaaataccataaactggtggcttataaacaacagagatttactcctcacggttctggaagctagaagtccgagatgagggtgctggtggccctcgtccaggttgcagactgccaacttctcgtagtgtcctcacatggcaaaagggcgagggtctctctggggcctcttgtataagtcgataatcccattatgagggtagaaacctcccaaaggtcccatctccgagttccatcactttgggggttaggattttgacatatgaattttgggggaacaccttcagaccttagcactctgtgtctctctgtctctctctcacacacatatacgtaagtgataaaaaactctaatggcagaactgaatttgggagcaagtccaacttttaacagatgtttccaaggagccaaaacaacaaaagtgaaaaaatttggggaacagaatagataagtggttctcatctctggctgcatagtgcagtcacctaggaagctttattttattttttctttaagttttttttttttttttgtagagacagggtcttgctatgttggccaggctggtattgaactcctgggctcaagcggtcctctcactttggcttcccaaagtgctgggattataggtgttaaccattgcgcccggccggcctggggagctttaatgcttgctgatgcctagctctaccagcagagatttgatttcatgcatctggagtatgacctgggtatcagtaattttaagaactctccaggccattctaatgtgcagctaaagttgagaacccctgagttaagactactaacatactaacattttttatttggctttaaaagtgaaaactaaataaaataaaaatcagatcttctaaatagcaggttaacagtaaaaccactatattttttctggccttcttgagactgtagtagtaccttttcttctttgaggaggcaggattgcaattgagagaaacaaactgtacaaataaaagtataacgtggcagctctctttaaaggtgctgttttttcccccctaaaagaaatgaagatattttctttttcttgttttccttttttgtatcttttttttttttttcttctttgagacagagtcttgctcttgttgcccaggctggtatgcaatggcgcgatcttggctcactgcaacctccgcctcccgggttcaagcgattctcttgcctcagcctcccgagtagctgggattacaggcacctgccactatgtccagctaatttttgtatttttagtagagatggggtttcaccatgttggccaggctggtcttgaactcctggactcaagtgatctgcctgccttgacctcccaaaatgttgggattacaggcgtgagccactgtgcccagcccttttttgtatcctaatggaccataccttcggagctcctgatatgcagaccagggccaatacaaacactctcatcttgattattcagtttcctgcgggcatacaagtcactaatcctcaaaaggttaagacaaactattttagaaagctattattaatgtaagaaagacttaaatagataaataaagaaaatgagagagagagagagagcaactttggcaattaagttaggtagaaagatacctaattttgtggctacctctggctctgagattagaagaacctgcactgaaacattgcgctagtggtcaacttctctgagaatttatttcatctataaaatgagacttcctgcctgggattcttacagtgattgagatatagtctggttaaatcatttaagaaacacctggcatgacacatgcgatgaatgttagttctgttatttctttcctcttaaaacaggattttttttttttaaatagggtctcgctctattgcccaggctggagtgcaatggtgcgatcttagcttactgcaacctctgcctcctgggctcaagcaattgtccttcctcagcctcctgagcagctgggactactggttaatttttgtattttttgtagagatggggtttcactatgttgcccaggctggtctcaaactcctgagtgcaggtgatctgcctgcttcagcttcccaaagtgttgggattacaggtgtgagccactgctctgggccccaaacaggattttagtttcatgtgttatctgtcaaagggaggggcaggtagcaggtggctgttggaactggcctaggtcaaacacacttgggattaggggctaggtcacacacacaaatgatgaagcccagctccattcttggtgagctttgtgacctgggcagattgcttcacctttctgagcaccagttttctcttcagagcaaggtattactgtgctgtgcacctacggggctgccacagtgagcaacctaggcactgtgccgatggactggtggcttccctgtctctcccacgggtccacaaggcttgtaggcagaggctacgtgatgtatgctcgcaccaccagtgcctgccaaatgcacagcacatgggaggtgctccaaaatgtttactgaataaaagagagctctgataaagacagctgtctaaaggaagcctattattgccgcagcttagtgacatctatttctgcaaatgtagagatgtaaaaaatatatacatctccgtgtatggctttgttttaaagccatcttgcctctagcaatctgacctctggataaattaaggtggtactgtactaatttgcttacactttagttcttaaaaggcattgtgtttctttaacaacgttaaattggccctagtggttggtgctttcagacgttgctttgagacatcttttacatatgaaattgaatttccaagtacagtactgatgaaaatggactctactttgtgcccaaaagcagtgacttttggtactataaatcgtttgcttattggtcagatttttgcacatgtaaggaaaaacacattaaaaaaaagaaagcagtttgcttagtagcgtttggcataagcagctgtctctaaccagtgtaacaaaaggcgtttgcttctgaacacatgtcaggaaaaccatcaacgggggagctctgaaattctgacttctttctctcttattaacaaaaaaagagagagaatgtggcttagtcgtcacatttcttagaagtattttaaaacgacgtggctcactcaaatccaataataaagtcattgagtgttaaaaagaaattataagaggcggggaaagaatgtttcattgccaaagccatcagaataagaaaaaaatttcatctgtatttttctaaatttctctataatatagacattactttttttctaagaagagaggtttccaaatatctaattttgctaagtggctctctttgttataacacgcagaactataaacattgtgcaagatgtttaaaataatacagctcccaggactactgagaattaattaggaaggtaaatttattacctaaataaattaataaagctgagtgccactcaaggtctgacattaagggattatatactttccattaaagagaactaataaatatagttgaaaggattgagggagggccgagggagtgagtaggctagcgcacaccagcacaggcggtgccagacgtcagctgactgtatccattgaggttaccatggaaaccccttcctttgggacactgccatgagggtagggtgctttagaaatggtgatggggcacagaccggcgggcggatggatttcagcagggttcaccctgtacgcattacaaggacaatccatcttccaaacgaaatgatatctttctagcaagtcacgtcaaatagagcaataaagcatgaagtctggcataattacagtccatttacctttacaaaacagtcacatcggttcagataattgtctcttttctctcccctgcttgctttgtattctccacagaacgaaaggaggtatttgtgcaattaattggctgcttccttagtcatcaagcccatactgataaaaagggactatatcaaaacaacattcatgggcagattcaaacattcttcagaccaaacacatcatgactcaacaacaaaagaagggtaagaagaattctagctgaggtaaggttatatgtttcggttactgtgctctcactcaaaactggcaaacagattttttgtttacgcaaattaaactcaatcttggcaacctgctccatggatgctggtttgggaggactaatgtccacatgaactctagtggcagaagtgcatttattcaagcaacatgcttcagccacggggagcaatctttcccaccaatttacagtgatctctagtatgattttcaaagagattgtgatcaaagttttggacacaatattgctaattatgtaggctatttcttgcttctgttttccatatcaagcctcagcaaccacaagtcccccagctcacaaaacattcaaattctgaccctactgtccctgtaaaaattttaacctttgttaacaattttacaactaatgctttaattcaatattacatacaaatatacctggtgactcaaaggggatgatgccaatttgacaataatgcagattccagttggctgaaaccctaaccttagtgtgcaatatttatacatagaaaggggtcacccgtaacttaatgtttcatgttgtttacaattatatgaccatgccatttgtgagaacagtgtttgctgaaaagagtctcaaaaacctgtcacgatttcctgtttttatctttcctgtgtgactagaaccatcattaaatggtaaattgaataattctcgctaatggaagagggggaaaaagtgccaaattcagcttttaattatgtttgcttaggcttacatgaagatcaagctttgtctcctgaaaacaaaccaactaatgacaaagagtgaagagatggttctcataaagattaattgataatccagtgtgtactgagttatatattttaggataatagaaaaatacatgatacaactacatacctattagaatggccaaaataaaaaaaagacactatcaaatactgatgaggatgggaagtaacagaaactcattaattcctggtggaaatggaaaatgatacagccactttggaaaatactggcagttcttacaaagctaaatttagtcttatcacaggattgagcaatagcactcctatttattcaatagatttaaaaacttgtgtccatacaaaaaacctgcttgcaaatgtttttagtagctttattcatagttgccaaaaagtggaagcaatcaataggtgaatggagaaacaaattacggcacctccatataatgaactatttcttgactaaaaaaacaaaatgtgccaacaagccatgggaagacatgacggaaccttaaaggcctactgctaagtgaaagaagacaatctgaaaaggctacattctgtatgattctaattatatgacattctagaaaaggcacaactgtagagacagtaaaatgatagtggttcccgtaggttcaggggaaagagggaaaggaatgaacaggttacgcacacaggatctttagagcagtgaaactgttctgtgtgatactgtaatggtggatacatgacactatacatttgccaaaacctacagaactcaacagcatcaagagtgaacctttgtgggcaacttaaaaaaaattaggaggttggggggtttcaggaaggaatgcaaaa[133 bp omitted]ggtgaaacctcgtctctactaaaaatacaaaaaaaattagccaggcgtggtggcgggcgcctgtaattccagctactcggctgaggcagagaattgcttgaatccgggaggcggaggttgcactgagccaaaattgcgccactacactccagcctgggtgacaaagcgagatttcatctcaagaaaaaaaaaaaaaaaggtatcaatctcactgaagagggcggaaagaaaaggtgctgacctaggtaactttggaaatgagtggagtgtgtaagactaaagggaaaaggaagtgcatgtagcactgtactctatttgataaagtcgtgcctcacaggagtacaggttaacaattctgatactgctatgcatggatactggaaatgaacaattaggtaaatggacagtggatggtgcaagccaggtttctcacttttggacagggaatttaaagataagcgatgggggaaggctagaatgactcatgtggtcatggactagagtgagagacactagtataaactcatgtttaacttcatataaagatggtcacatataaaaatatttataaagatgtgtatatacacagattatacacatatatttctgtcctgtgccagctgagaggacctaaaagaaatgaatccccggtagcaacaagcacatctagtattcagatctgtttctttcttttgtagagacagtgtctcactattttacccaggctggtctcaaactcctgggctcaagcaatcttcccatcttggcctcccaaagtgctgggattacagacgtccagcctagtaatattctaacacaggattatgtgatgattgcacaactgcataaattactaaaaataactataacttacaatgggcaaattttatggtatgtaaatatattagtttgctagggctgccatgataaagtatcacagactaggtggcttaaacagcagaaatgtatttccttgaagttctggaggctggaagtttaaaattaagatgttggtagagttgttcctcctttttttttttgaaatggagtctcgctctgttgcccaggctggagtgcagtggtgtgatctcggctcaccgcaagctccgcctcctgggttcacatcatcctcctgcttcagcctcccgattagctgggactataggtgcctgccgccacatctggctattttttttgtatttttagtaaagatggggtttcaccttgttagccaggatggtctcaatctcctgacctcgtgatccacccgcctcagcctctcaaagtgctgggattacaggcatgagccaccacgccctgccggtagagttgttcttctgacggcttctctccttgccttgtagatggctgtcttctctctgtcttcacatggccttccctctgtacctatgttgtaatctcctctcatgtggacaccagtcatactggattagggcccactcttaagatcccactttaacttaattactactttaaagaccccatctccaaatacagtcactttctgaggtactgggggtttggactctgatatataaattttgggggaacacaattcagtctgtaacagtgaattatacctcaagaaagctattttaaaaagtcaatatgatgggaaaaaaacagggtaggggtatatgtgagtggaagtgcagtgtggactaaaacagaccagagatgtaactaccaagtgccatatgatggaataattttacttctacatatgtaaatgtgaacctacacagaattctgttattaaaaaaacaggtttaaaaggcagtctttggctaggtgtggtgtggctcatgcctgtaattccagcactttgggatttgaggctgaggcaggaggattggctgaggccaggagttccagaccagcttgggcaacgtgagaccctgtctctacaaaaaaaattttcaaagtttagccaagagtagtggcgtgcatctgcagtcctagctacttggaaggctgaggagacaggaatgcttgatcccaggagtttaaggctgcagtgagttatgattgcacaactgcactccagcctgggcaacagagcgagaacccgtctcttaaaaaaaaaaaaggtagtctgaacaactggggaaatttaaatatgtactgaatattagatgatattatggaaatattaatattttagatatgaaaatggtattgtggttatgaaggagaatgtccttattcttcggagatgcacacgtgtatttcaagggtgaagtgtcacaagacagaaataaaacacatatggcaaaaaataaggccttagtgaatataggggtggggaacatgggtgttccctgtgctattctttcaaactctgttagtttgaaatttttcataataaaaagtcagagggatagaattagcagtgaactctgagggaacagaatgctcttaagttaggaaagatttgcttatcagagatttcctttattcccttccttccttgctaactaaagtagaaaatatattctcctaaagcttgcacccaattatagctccttataagtgagtgagaaatggttagtgtctatctctgctccataaagtctagaataacacataacatagattttgagtttttaaagtttggcatggaggaggccaaggagtctggttatagctcacttcaaataacaaatgacaagacctcttttaataagagtagcagactggaaacctggggctgaatatggcctatagacatgttttttttatttggcttgcaaggcattttaaagttagttcataatacttaacaattaggagatttcacataaaatgcagacttctgatttttctaggcatatccaaagctttggcccagtggattcaggcatggcccaaaccttttggagcggagtggcggctgccgtgtcatgaggtatatgctgcattcgtgtatgtgcccatctgactcctaaaggcatttgacttcatgagaaagaaaacatgcaaacttaagtactatatatatatatatatatatatacacacacacacacacacacacacacacacacacacacacatatatatatatataaataggcaaataggaagctgtcctttctgacagaattccttttaccatcatcccccgctctttttcccttcatatggttgtggcaaatgacagtgttatgttgggaggaggtaagacggaaaggagggtatctgggaatttattgtaatttttgggttcataatacctttgtccaacagtaatcaaaacagtaactggcacaaggatatctaacagaccaatagaacagagcagagaatccggaagaggtgtatggacactcggtttatgacaaatatggcactgaagagcaatggagaaaaatgatctcccccgcacagaacacaaaagcacacttaccacaaattactatctatgtagtaatttaaaaacatactaccaaactactcatggcttaaagaggaactcacaatggaaatcacaaaataattaaaactgaacaacaaaggtagtatcacacatgtgaagttcagctcaagccattcttaaatacaaatttacaaattcaatgaatttttaagactaaatttaaaaaaaaaacagttaagcccccaactaaaaaggctagaaaaagaacaacctaaagaatgaagaaggaaaaaataagagcagaggtaaatgaaaagataacaaaatcaataagagagacagacctacagcaaaactgatcttggaagaaatgagaaaaagtacatataatcaatattaggaacacaaaggagtatatacctataggtacaatgaagagctcttcactctagtgtttcacacatccctctctttaagtacactgaaatctcccccaggcttgagtgatcatttaactaatttgcttcactttcctctttacttacatcctcctcttacccccttcatagatagcttgctttcttcttctttttcttctctttctcctcccatttttattagggtataacatgcatgccctagagtgcacaaatctcaagtaaacagcttgatgagttcttacaaatgtatacatctgtgaaccccccaccagatcaagctattacacatttccagcccccacccccatcccagaaggctccttcctccctgctcgtgtctctgtgtctttgctgttccttctgtctaaaatactttccaccaagtacacgtacggttcattccttaactccttcaagtctttgcttaaatgtcaacttctcagtgaggcctggtcaccctatttaaacttacaacacacctcacacgttctatcttctttcctgattttattttttcccttatcaccttctatggactatatcatgtgcgtatgtatatacatacacacacatatacttttccccattggaatgtaaattccaagacttgcagagattttgcctgttttgacacctctatgttcctaatacatatgtggctggcatataatgaacacttagtaattatctgaattgaatggtttagttattgagggtgtgatgtatagatgatctgatgtataactgcctaaaatcccaaagaaggtaatttctagactgtcattctctctgacccagatgcaatttaaaatcgcccatctcctgtctactcgaggtcccttaagtctctgttcattacaactcaaaacctagcaggaagaaatgagcaccaggatgctgcaaaaagcaactctcaagagggggtgtgcaattggctgcagcatctcaacaaggaggggcaaaggaggattgctccacccagtgtggaaagccagcagttcatggtctgtacggaggaagatgttacttaacctatcactggtgacccatgggagatggctggtgtgcccattaaagttagttgctgatttatagaagttcaatgcattaggagatgtaaggatagtgggattggatgggtattttttatagtgcattaggaaaacaacaaatattggtcccatagtgcgtggctggaggcagttaaggaaacagaggaaccactttctgctgaaagcactcatgaagactacgttcaagaatgattagacaaactaccaaattgcaacatcagctgagttttcacccatcctggagattcatgagcacaattttaggtcctgtttgacaaagactgggatgctggcaattggagtgggagtagctgggaagaatccaaggacctaggatgcctggccaacctggcctatctgaagcacttctcttctgctcctttctgctgggaaaacccaatgacccgccccaatattcagcgtgatctgtgaccaaggtccaaatgtggcttgggcctaaggatgacagtgataaatagtggagggaggagatcagttataccccaaaatgaatagtaggaattatccatgccataccagaaaaagtaaggaaagactatgcatagatttgcaagcattcggcatgaacaaaagtaccgatctggatcacccagcattggttgctatggcgaggcctcatctgagacactgtgttcaatatgttactgcaagatgaaactctaatggtttgctgagttggctgactcagaccttagcctaaagctgacccatgctgtctagcaagaaagaagtaactgtgagtaagaagatagacaaagagaaaaagagaaagaatggcagaaacataggctatgcaaaactcaggttgtggaggaggctaaacgatagcagggtcccttaaagctgccttaaaacctgaatggtagcatttcctgggtttccatgggatttgattcccttactaccctggtacctttactaaaataaaaaatggggccaggcgtggtggctcatgcctgtaatcccagcgctttgagaggccaaggtgggcagatcatgaggtgaggagctcaagaccagcctggtgaaaccccatctctactaaaaatacaaaaaaaattagctgggcacggtggcaggtgcctgtaatctcagctacttgggaggctgaggcaggagaattgcttgaacctaggaggcggaggttgcagtgagccgagatggcgccactgcactccagtctgggtgacagagcaagactccgtctcgggtggcgggggggtggaaagaaacattacttaagacagaatgcgcttacagtctgtccttggagcaagaaaggactaactaaaacaggaaaggagcctctatagaaggagaaatgaaaggtggagaatgagagaagtatggatgcccttagctatgccctgtatgtttttattgactactcttatttctgaaaactttccgatttgattttgaaacatgatgttcccatagtttttttctttcgtagaataatttaaaaagtatagaactgaagggaaattagagctcatttagtccattaaaagagagatgagaaaatggaggtccataaagaaatttcctttttattccatttccttcagtgattctctttttcccaccatttaactgtggatgtttttgaataatccaccccctttctctctctcgactcataatttcagcctccaactatacatgagtccactcttaaatctgaagtgatgaattctttcccactctataccatcagacttccaactatctatggaaagtatacttgtacgtttcacaaaaacctcaaattcaatatggttaaaattgaaatcactttccttcatcccctcccagcttctccaacactattattagcatcatcatgttttaaaaaggttctttatcttaaactttgtttttaatttcaaaatatttcaatcatacagaaaagtataaataataatataacaaatactcatgtccctatcatccacacctaatattctgacatatttgcttcagacttaaaaacaatgacaggtctagttggaagttccccatcacatcgaacttgctccctctgaaaaggtggctgcccttctgaagttagttccacccagaagcagaccctgagataaaggctgatgagtatacagagttgatttgggaggttcaggcacactggcaaggaagtggggagagaaggcagccaccactgtgggcaagtttactcctgcagggaagctctaggagatggtgtgagacagcctggaactgtcttggccaatgagtgatggagatggagtatttataccccacacttatcacacaatgagtgcctaggcacttccagccctctgtgagtaagggcaaagcaggtttggcagcctgagggcagctttttgacaaagatgttggctgctggaaatcaggctggtatgcacaaatatggtatgggaatacgagacggtatgggcagggtgttgacagcatctgcaacggggtgtatccatcccactgacgttttacctttactactgtagttaaacattgttagtttttatgatgtcatgatattattaataacaattagcaatgataatgatgaagataaagggaaacagtgactataaaaaccagttgacatgaataagggaaaacagcttcggttcaaagagctgtttaactatttattgaatttatatcatgtgcctgatgaatctccccttaatagaaagcaaggaaaaggaacaaaacacataccacaattaatttttttggtttcacacttctttagacttggacaaaatatgattttctgcctcatctatcttcatctcctacttcaagattggagggttattaggcttaaactgtaactgcaatagaagattataagtctatatataagaagactatatataatcaagagtgttttagggctgggtgtggtggcttatgcctgtaatcccagcactttgggagaccacagcgggtggatcacttgaggccaggagtttgagaccagcctggtcaacttggcgaaacccctcatctctactaaaaatacaaaatacctgggcatggtggcgtgcacctctaatcccagctactcaggaggcagaggcacaagaatcacctgaacctaggaggtggaggttgcggtgacctgatatcgtgccactgcactccagcctgggggacagagtcaaactgtctaaaaaataaataaaataaaataaaaaagagtgtcatatcattttagccttagttgcaatctattggcctttctattgaaaggaaaaaaggtgtgtgtgtgagggggttgggtgaggggtgcatagtgaagacggatctccaccccatagtctaaatcattctaaagcattcagcaaagccaggaatagtttgtcttccttgtaccttataactaaaaggacccctgacttagcaaaataaaactgtaaaacaatatgtttcctattccctcttgcagcaaccaaaaggatttaaaatattctctaagtaatactcctcatagttcccagtattagacaaacacagtcttccttctttaacaactaacagaggaaaatcacctgacacgtgaaaagatccaatattccggtaggatctttccgaagaatcagaataaacagtcacttgtaaagcagactctattaagaaggacaaattacaaacaaacaaactcatattgcgattcaaggagatacccacgaaatttcgtatttcaaataaaaaatgataacggaattagaaaactgtatggttatagtgaacaataaagtggacttacaccaaagatcacacaatcaacaactaaatatgcacaaaatatatggtgaaaagaattctggaagcagcataaattttacatttaaaagagaaaaagtaatattttaagtaatcccctaccgattttctaccatttccatataaaaacaaaccttatgaaaacaaataagaaaatgcattatacgccagtgcatttaaacagtggatcaggaatagagaaagatcacaaagaatcagtagtccttacactttaaaaaatgtctgcatttatctcttggaaactttggatccttttagaaaactgtacatttctacaaaacatatgacacataaaatttcaggaattcatgggcatcctaaagccccaaagattctagaactcagtctattgacccattagtggtccatgagcaccaggttaagaatctttatccagagagaagcacagaggacttacattgtatagagggatagtcttcatcaccttgtactgtttagtgggatccattttatacaggtgacggtcagtgacaaaaattgctctgtcttccaccttactaaatcgatttacctgtaagagaacaaaccaataaaccatagtatctcatcaataaggaaatcaagttggctgattgtgaagacaaattctttaatagatgtgaaccatgtatggccactctactggatgcaataaagatttaaaaggagtagctgttcccatacttgtggaatttggcaattgaaattttacaattgaacatggaaaacaagaaaaccacagaagaattaaaggactaaacatatgtaacccagacaccatcaagtaagtaaaaaggcaaacccagagaatgggagaaaaactttgaaaatcatatatctaaaaagggacttgtatctggactatgtaaagaactaatacaattcaataactaaaaggaaaataacccaattatacaaagaaataatatgaagcccttggttataataagaatctgagactggtatatagggataagacaaataggaaactaataagtaaaaataatttcatataatgatataaagaaaataaactagattatgagattgggagaaattttgtgtgtgtgtgtgtgtgtgtgtgtgtgtgtgtgtgtgtgtgtgtgtagaatgctactttattagacagagggtcagagaagattcacatgttcaggtaaatcttttcctaagagcagaattaaccacaggatattttataagtagttagctacttagacttgggtaataaacacatatgtattttaaaaagatgagggtctcactctgtcacccaagatagtgtgtagtggctcaagcagtgactcagtgcagcctcaaactcctgggctcaagtgatcctcctgcctcctaagttgttgagactgccagcatgcgccaccatgtccagctagacttggatactaatcaacgtacctagcactaaacatttttgaaccactacgatatcatgtttttcagtaactagaaggaaaaagaatgcaaaccaaaccaacaaacagaaaacttaaaaagccctcctcaactagaaaagaaggcatagttgtgatctatatcctccatcccctccttcaaattcttatttctaagatgcaaacaaagaagttagagatcaatttgaaaacatggttagcttcggtaggctatttagctaatgaaattaagattggcaggatggaacatagcaggatatattgctatagggaggatatagcaaactaaaatttaaattttagtttgaattttattcaatcttctcccctttgccccatagttttagaaatcagtcaattctctaagcatttccttaataaccaaagcacatttttttcagtcttcaacttgacaaaaatggtgtctgtaattgagagtaaaatagaatctatatggtggaataattattagccttagtaaataactttacatagcaacagcttttgctattaacagaggattggcacttgtcagaaaacttgaaacacagtgagtgaagagcttctatagcagcatttttctttctttttttcttttattattatactttaagttttagggtacatgtgcacaatgtgcaggttagttacatatgtatacatgtgccatgctggtgcgctgcacccactaactcgtcatctagcattaggtatatctcccaatgctatccctcccccctccccccaccccacaacagtccccagagtgtgatgttccccttcctgtgtccatgtgatctcattgttcaattcccacctatgagtgagaatatgtggtgtttggttttttgttcttgcgatagtttactgagaatgatgatttccaatttcatccatgtccctacaaaggacatgaactaatcattttttatggctgcatagtattccatggtgtatatgtgccacattttcttaatccagtctatcattgttggacatttgggttggttccaagtctttatatagcagcatttttctaagctgttcagttctagccttatgtgaggttttgtgaaagtaagggtccatggacaagttggtttcagaaatactgcaaaccacagcctccactagggatattcatatcccatgaatatatattttttcctttttaaaatttattttattattttttatatatagatttttaaaattatactttaagttctagggtacatgtgcacaatgtgcaggtttgttacatatgtatacacctgccatgttggtgtgctgcacccattaactcgtcatttaaattaggtatatctcctaatgctatccctcccccctccccccaccccacaacaggccccggtgtgtgatgttccccttcctgtgtccaagtgttctcattgttccattcccacctatgagtgagaacatgtggtgtttgcttttttgtccttgcgatagtttgctgagaatgatggtttccagcttcatccatgtccctacaaaggacatgaactcatccttttttatggctgcatagtattccatggtgtatatgtgccacattttcttaatccagtctatcattgttggacatttgggttggttccaagtctttgctattgtgaatagtgccacaataaacatacgtgtgcatgtgtctttatagcagcatgatttataatccttagcatatacccagtaatgggatggctgggtcaaatggtatttctagttctagatccctgaggaatcaccacactgtcttccacaatggttgaactagtttacagtccaaccaacagtgtaaaagtgttcctatttctccacatcctctccagcacctgttgtttcctgactttttaatgatcgccattctaacttgtgtgagatggcatctcattgtggttttgatttgcatttctctgatggccggtgatgatgagcattttttcatgtgtgtgttggctgcataaatgtcttcttttgagaagtgtctgttcatatctttctcccacttgttgatggggttgctttttttcttgtaaatttgtttgagttctttgtagattctggatattagccctttgtcagatgagtagattgcaaaaattttctcccattctgtaggttgcctgttcactctgatggtagtttcttttgctgtgcagaagctctttagtttaattagatcccatttgtcaattctggcttttgttgccattgcttttggtgttttagacatgaagttcttgcccatgcctatgtctgaatgttattgcctaggttttcttctagggtttttatggttttaggtctaacattttagtctttaatccatcttgaattaatttttgtatgaggtgtaaggaaggcatccagtttcagctttctacatatggctagccagttttcccagcaccatttgttgaacagggaatcctttccccatttcttgtttttgtcaggtttgtcaaagatcagatagttgtagatgtgtggtattatttctgagggctctgttctgttccattggtctatatctctgttttggtaccagtactatgctgttttggttactgtagccttgtagtatagtttgaagtcaggtagcgtgacgcctccagctttgttcttttggcttaggattgacttggcaatgcaggctcttttttggttccatatgaactttacagtagttttttccaattctgtgaagaaagtcattggtagcttgatggggatggcactgaatctataaattaccttgggcagtatggccattttcacgatattgattcttcctatccatgagcatggaatgttcttccatttgtttttgtcctcttttatttcattgagcagtggtttgttctccttgaagaggtccttcacaacccttgtaagttggattcctaggtattttattctctttgaagcaattgtgaatgggagttcactcatgatttggctctctgtctgttattggtgtataagaatgcttgagatttttgaagactgattttgcatcctgagagtttgctgaagttgcttatcagcttaaggagattttgggctgagaccatggggttttctagatatacaatcatgtcatctgcaaacagggacaatttgacttcctcttttcctaattgaataccctttatttctttctcctgcctgattgccctggccagaacttccaacactgttgaataggagtggtgagagagggcatccctgtcttgtgccagttttcaaagggaatgcttccactttttgcccattcagtatgatattggctgtggttttgtcataaatagttcttattattttgagatacgtcccatcaatacctaatttatttagagtgtttagcatgaagcgctgttgaattttgtcaaaggccttttctgcatctattgagataatcatgtgttttttatctttggttctgtttatatgctggattacgtttactgatttgcatatgttgaaccagtcttgcatcccagggatgaagacaacttgatcatggtggataagctttttgatgtgctgctggacttggtttgccagtattttattcaggatttttgcatcgatgttcatcaggtatattggtctaaaattctctttttttgttgtgtctctgccaggctttggtatcaggatgatgctggcctcataaaataagttagggaggattccctctttttctattgattggaatagtttcagaaggaatggtaccagttcctccttctacctctggtagcattcagctgtgaatcctgtctggtcttggactttttttggttggtaagctattattgcctcaatttcagatcctgttattggtctattaagagattcaccttcttcctggtttagtcttgggagggtgtatgtgtccaggaatttatccatttcttctagattttttagtttatttgcgtagaggtgcttatggtattctctgatggtagtttgtatttctgtgggatcggtggtgatatcccctttatcattttttattgtgtctatttgattcttctctcttttcttctttatgagtcttgctagtggtctatcaattttgttgatcttttcaacaaaccagctcctggattcattgattttttgaagggttttttgtgtctccatctccttcagttctgctcttagttatttcttgccttctgctagcttttgaatatgtttgctcttgcttctctagttcttttaattgtgatgttagggtgtcaagtttagatctttcctgctttctcttgtgggcatttagtgctataaatttccctctacacactgctttgaatgtgtcccagagattctggtatgttgtgtctttgttctcgttggtttcaaagaacatctttatttctgccttcatttcgttatgtacccagtagttattcaggagcaggttgttcagtttccatgtagttgagcagttttgagtgagtttcttaatcctgcattctagtttgattgcacaggtctgagagacagtttgttataatttctgttcttttacatttgttgaggagtgctttacttccaactatgtggtcacttttggaataagtgcggcgtggtgctgagaagaatgtatattctgttgatttggggtggagagttctgtagatgtctattaggtccgcttggtgcagagctgagttcaattcctggatatccttgttaactttctgtctcgttgatctgtccagtgttgacagtggggtgttaaagtctcccattattattgtgtgggagtctaagtctctttgtaggtctctaaggacttgctttatgaatctgggtgctcctatattgggtgcatatatatttaggacagttagctcttcttgttgaattgatccctttaccattatgtagtggccttctttgtctcttttgatcttcgttggtttaaggtccgttttatcagagactaggattgcaacccctgcctttttttgttttctattagattggtagatcttcctccatccctttattttgagcctgtgtgtctctacatgtaagatgggtttcttgaatacagtaccctgatgggtcttgactctttatccaatttgccagtctgtgtcttttaattggagcattttgcatatttacatttaaggttaatactgttatgtgtgaatctaatcctgtcattatgatgttagctggttattttgctcattagttgatgcagtttcttcctagcatcgatggcttttacaatttggcatgtttttgcagtggctggtaccagttgttcctttccatgtttagtgcttccttcaggagctcttgtagggcaggcctggtggtgacaaaatctctcagcatttgcttgtctgtaaagtattttatttctccttcacttatgaagcttagtttggctggatatgaaattgcgggttgaaaattcttttctttaagaatgttgaatattggcccccactctcttctggcttgtagagtttctgctgagagatcagctgttagtgtgatgggcttccctttgtgggtaacccgagggctgcccttaacattttttccttcatttcaactttggtgaatctgacaattatgtgtcttggagttgctcttctcgaggagtatctttgtggcgttctctgtatttcctgaatttgaatgttggcctgccttgttaggttggggaagttctcctggataatatcctgcagagtgttttccaacttggttacactctccctgtcactttcaggtgcaccaatcagacggagatttggtcttttcacacagtcccatatttcttggaggctttgtgcgtttctttttatttttttttctttaaacttctcttctcacttcatttcattcatttgatcttcaatcactgataccctttcttccagttgatcgaatcagttactgaagcttgtgcattcgtcatgtagttctcgtgccatggttttcagctccatcaggtcctttaatgacttctctgcattggttattctagttagccattcatctaatcttttttcaaggtttttaacttctttgtgatgggttcgaacttcctcctttagctcggagaagtttgatcatctgaagccttcttctctcagctcgtcaaagtcattctccatccagctttgttccattgctggtgaggagctgcgttcctttggaggaggagaggtgctctgatttttagaattttcagtttttctgctctgttttttcccgatctttgtggttttatctacctttggtctttgatgatggtgacgtacagatggggttttggtgtggaagtcctttctgtttgttagttttccttctaacagtcaggatcccatgaatatattaaaggctgtgagaattctgcacttaaagagcatgtttaacccagtatttacaaaatacttttaactatgaaaccctttttcagcacctacaaatattcaatagaacactggttctgtaaaactcatgttgaagaacacttactatcacttgtatgaatcttagagttcatagagaatatctaaaataggcaccaaataatagctaatcccagctacttgggaggctgaggcaagagcattgcttgagcccgggagtttgaggctgcagtcacagcctgggcaacagaagaagaccctctctgtaaaaatatatatatatataaaagaaaggaaacaataataagtaaaagtcatgcacgtcatcttttgtggaatcatactgaaaaacatatgagtgtagggcaaaagaatatgatttaaaaaacctgttacataatttcataaggtcattccagagtcaaaacaagtaggtcccatgtccttttatatgttcccgagttaatctaaaaacaacaaacgaaaacctcaaagcagcaattgtatgaaaacactgtttgaaaatattacgtttttatatgcaaaaaatgtaatttctaaagagaacatatcacaaatctttaccttctgtttcagcagcttaaattatcctcagaatatgaattgagtgggaaggacatcaggtaacaaagtaaaagcctcagattgcataatttagctatattaaaatggcaaaggaaaaaattctacatatagatgtaaattccagacttataattatggcaaaaaagcactcttttcttccacttaaattcatatagtaatagaaaaactagattatagactctgtattagataaaccctcatcttgtttcttctattatccaaaactaaaatcttcaaccaaagaaaaaaatccctagcatttgtttttccctaaacactacaagtgatctgtctataggtttagtcagtaccacagggggccacagataaaagtttatctggagaggcagataaggagaaaacacatcatggttgagagtagctatttgcagaagtctttcaccttaaaggacattttataatgtggttaatggaaagtggctgtttcagagagaatctaagcataaagaagagggctttactgaaatcctatcaagtttacgctggcgtagccttgggattgaacagtttctaaagtcgtatttaagctatagggtgaacaaagagtattttgctttgaacttggaaatacagggacatgaataagaatgcttcagtttttaatccagcaggacccaggtaaagacatgttctctgtcagacataaaattgtcattgctggaaagatagagacatcaggcatttctgtagtaaatgacctaattcttaaaaccatccaactgtctttgatcaactgctctgattattaatttgattttccagctgcttgatactaaagtgtactagatagtgaatatgaggactcactgacatggtacattcctttgttatatttacaaactgacattatagcttatacattttttttttttttttttgcatgggtgtgtgaatctggttagcaaaagtcttttcttgatagtctgatcgactctaggtatacttataaaatagagtttctaaatctcagagttcagaactaaactctggagtgtggtaacccaccccaagatactgccagcagtctttccttgatgacatttatttcattctaactgtaaccagctgctctctattttgttaaaaagcccctatcacactgaggactgggcacgatggctcatgcctgtaatcccagcagtttgggaggcctaggtgggcagatcacttgaggtcaggagttcgagaccagcctggccaacatggtgaaaccctgcctatactaaaaatataaaaattagccaggcgtggtgatgtgcacctgtaattccagctactggggaggctgaggcaggagaatcgcttgaacccaggaggcagaggttgcagtgagccaaaattgcgccacagcaccctagcctgggtgacagagtaagactgcctcaaaaaaacaaaacaaaaaacaaaacaaacaagcctctatcacgttgagttgacctctttcttcttccttataatgttcaaacactgattgtgatataataagaaatacatatatttgctcatcatcccagttcctgacacaaagctcccaaaactcttgtgattttatgagtgatagaggttatagaatcaccttttgttatgatatttatttagtcttagtcccagattcccaacataagagtttctatctgctaatcagataactggtgactaggagctcctagatagtttcaggattggggctggttgccagaaagaccaaggcatgattagagggttggaactttcagccccaccccttaaccttcacggaggggagaggggctggagattaagttaattacccatagccaatgatttcatcaaccatgcctgtgtaataaaacctccataaactcaaaattatggggtttggagagctttgggggtggtgcacacatccacatgctaagaagccataatctttgccttttaattgcggtgtgtttagaccattgacatttaatgtgattatcaatacagttaggcctaaatttatcattttcaatttgttttctatttgtcccatttgttctttgttcccttttccacatttctctgctttcttttgcattgagatttttttttataatttcgtttctctcctttgttggcttattagttataactttttgtattgccattttagtggcttttctaggatttacagaatacgtttataacatatcacagtctactgacattatatcactttatggtataaaaaccatacgacagtatatttccatttcccccatctttgtgctattgttatcataaattttacttctacatatattataaactctacactactttatcactgtttctgtttaagtagccaattgtgttttttcatttaaaaaattcggtaaaatacacataacaaaattttctatttggatcatttttaagtgtataggtcaatgcttcattggcattaagcacattcacattgttgtgcagccatcaccactatctttctccagaactttcatcattccaaactgaagctctatacccattaaacaataactccccagtcctctctttccccaacccctagaactaccattctattttctgtctctatgaatcagatcattctaggtaccatatataactgggatcatacaatatttatccatgtgtatctggttatttttcttagtataatatcaacgttcaccttggttgtagcatgt[135 bp omitted]cctccaccccccgggttcaagggattcttgtgcttcagcctcccgagcagctgggattgcaggcctgtgccaccacgtctggctaatttttgtatttttagtagagacagggtttcaccatgttggccaggctggtctcaaactcctggcctcaagtgatccacccgcctcagcctcccaaagtgttgggattatgggtgtgagccaccatgcctggcctataccacattttcttaattcattcatccatcgatggacatttcaattgctttcacctgttggttattatgaattatgctgccataaacattggtatatagtcaattaccttttaaagacatttaagtaagaaaagacatgtatttgtctatgtagctaccacttcacttgctcttcattctttggtgaatgtccacattttcatatggtataattttccttctgtctggatgacttcctttaacatttcctatagtgtttatcttcagatatgtctgaaaaagtctttatttcactttggtttttgaaagatatatttgctgggtatagaattctaagttgttgttgttttttcaccagtactttaaagatgttgctccactgtctccttacttgcattgcttctgacaagaaattggatgcatactttctttgttccttcgtgtcttttttctctttattactggtattgagcaatttagttacaatttaccgtagtatagtttacttcatgtttcttgtgcttagtgtttgttgagcttcttggatctgtgcatttaacatttcatcaaattttggggaaatatcagctgttattttaaaaaatattatttatttctctccttctctcctctccctcagagacttcggctgcacctatattaggccacaggaagttatctaacagcttcctgatgctttgttttagccttttatttttctctctgtgtttaattctgggtagtttttattgctatatcttcaaattcactagttttccttctgcaaagactaatctgctgttaatcccattgagtatgttttttcctcccagaaattgtatttttcatctttataacttcatgcaggtcattaaaaaaatcttccatgtgtttatttaacatgttaaatctttcctctagctttctgaagatatggaatacaatcataataattattttaatgaccttgtctgttaattctatcatctatatcagttctgggtcagtttgaatgattaattttttttctccttatgagttgtagtctcttgttttgtatgcttggaaacttttgagtggatgtcatatgttgtgaattttaccttctgtgagctggatatttttgtattcctataaaaattttttggctttgttctggttaggttacttgggaacagtttgattatctctggttgtgctttcaagatttattaggtaggatcagaacagtgtttggtcaagggctagttataaccccctactgaggcaatctcttgtcagtactctattcggtgcctcataaatcatgaggttttccagtctggctggtgtgaacaggcactacttgcaaccctgtgtgagtactgggcattgttgcctataatccttttgggttgctgtttcccagccttgagttatttcctcatatgcacatatgtatgtgctgatcagtactcagacgaacagtcaaagtgaactctacagatcttcagagttttctctctgtgcaactctctcctctctgatactctgctccacaaattctagctgccttagtctctctcactgttgaaaagctctgtctttgtctactgggctctgcctgggcttcccccactgctcatcctgggactggaaagtctctcaagacagaaaactggcaaattgcagggctcatcacctcatttttttcttcatatttcagggaacattgtctttccttgcttgatgtccactgtcttgaaaaccactgtttcacacattttgtccttttctccccacatagatatctttttcccactttttttttttttttttttttagacggagtcttgttctgtcacccagctggagtgcagtggcacgatctcggctcactgcaacctctgcttcccgggttcaagcaattctcctgccccaggctcctgagtagctgggactacaggtgcacaccaccagacccagttaatttttttgtatttttagtagagatggggtttcaccatgttggccaggatggtcttgatcgcttgacctcatgatccacccgcctcggccttccaaagtggtgggattataggcataagccactgcgtctggcctcccgctaatttaatatcagtgtatattactgtgtacatacacaattgattaattacctattgatatatattcacattttttccagtttttctggctgttacaatgtacaaacctgtacatctctctctctctgggtatttgtacagatatatttgtagggtaaatatgggctgtggaattcttagattaagtggtatgagaattttaaattttgatagatattgccaaattgtccactctaaatgactatatcttatactccgaccaaaaatgtcttcttacatccttataaacattggttattatcaacactttaaagactgccaaatttatagttgaaaaatcatatttcattattttgatctgaatactactgtaattattattttttaaaagatctgaaatgaagcacgtgtaaaatcacctaaacttgggcctttattatgaggtaattctttgataattttcttaattcctcctttgtctattgccatatttatgttactgtctcttcttggatcaacctagttaatattttttaaaaattataatttcattaatattttaaaatgtatttggataattctacaaaatactcttttaatgataatttcaattcttctgtgttcttctaaacaagtattttaaggttttttttttaagactagctacgtcctttgccttccacttcccaacttccatttgcccaactgctatcatctccaggtaaatagcagcccaagtatcctgcaccagacaagcaaatacattcatagcaggtaacttttccctcaccttccgaatctcaatatgccctactcctctttttaaaactcagttcttcctctcccaaaccctgttttatagaaataatgtaggtataggctggg[138 bp omitted]ggtggtgggcgcctgtagtcccagctactcgggaggctaaggcaggagaatggcatgaacctgggaggcggagcttgcagtgagccgagattgcaccactgcactccagcctgggcgacagaatgagactccgtctcaaaaaaaaaaaataaataaaagaaataatgtaggtataaaaagtactaaatgacaattaaatataaagcagatatacagctgctatgaaagatacacatgcagtgaaatacaaatccctgactttaaagaggtccccgcaatctagtttttttgttttttttttctagttttaaaaagaaattggctgggcatggtgagtcagtcctggaatcccagcactttaggaggctgaggcaggtgaatcacctgagatcaggagttcgagaccagcctgaccaacatggtgaaaccctgtctctactaaaaatataaagttagctagacatggtggtgcatgcctgtaatcccagttacttgggaggctgagacaggagaatcacttgaacctgggaagcggaggttgcagtgagccgagattacgccactgctgtccagcctggacaacatgagtaaaactccgtctccaaaaaaaaaaaaaaaaaaaaaggttatcacttcccttaggaaggctttatagcctaactgtaaagttgtagtcacctcagccattcctacaatgcctcagcacagacaggtctagtgaactgatgatgaagctagttatgtacctactgttatgttttattacaggcttgcttaagtgagtttcatctgaatcagtctttcctttccaagatgatctggtttaagcttgccttaccttacggacgtgacaggaaaagaggacattcatgtatttgtccttccgtttcaattcattagcaacagggacaaaagtgcctgaggtctgaggtgtatctggcttctgaaagagaaaggaaacaagacaaaatgagtatgcttagcattttagaaggaaaggcaatctttcagtgtactgctttataactacacttatatagtttcacacatgcactctttatctcctcaccccagatggtaagctactaaatggttgttgtaacatcaaagatcctatacaaattttaaaatagggaatgggagagaggataaagtgtagctctgggaataattaatataaaggtagtaattaaaaaatcgtcactgaatgatgtaagggaaggtttaaatggtcaaaggccaggttatagagtgtatttaatacatatggatacaacacacagaacccttttaaacacgggagaaacatcaaatactgtacatttagaagcaataaaatgttttagtatctcatagaaattatttagtttctaaaagtgttttatcctttctgcaaattctttggagatatgtacttctcttttttagtagaggaagtagaagtagatttcactttgttcccttggacttactgaagcaagatagttgccctcccaggccctctggagcccgaggtcagccctttgacccttcaacatttccacggctgcaacctttgccctgacctggggcaggtctgaggccggaatgctcttgatgagctgggatgctctccatctacaagtaaatagacaacatgtattagactttagaaatgcaatcccatgcattctctctctctttttttttttcttttttgagtctccctccatctcccaggctggagtgcatggcatgatctcagctcactgcaacctctgcctcccaggttcaagtgattcttctgcctcagcctcctgggtagctgggattacaggtgtgtgccaccatgcctggttaatttttgtatttttataagagatggggtttc[133 bp omitted]tcattaagtagaatgaaatcaaagcactggcatgctaaaaaaagtaaaatgcctccaaaatacacacagaagttgctaaaatacatatcattttatgtagacagatctttcctaaaacttgctttgttgtttgtgtgttttgaaagcaactagaacttagtgatacatgggctctcataatatttatatttagggcatagaaaattggattcatcattcattcattcaacgaaggttttctaggtgcctgctaaactcccagtgctgttgtaggcagtgggggcacagtaataagcaaaacaaaggtcctttctgctagctgcttgtcttctggagagaagtgacagatagcaaatatatgagtagacatatagtatgtaggatggtgaaggtaaggcaaggaggaccgggagtgtggaagatggaaggaatgcagagtgggtgtggtttatatagggtggtttatatagggtggtctgggcaggcaccactgataaggatagatgagcagagacctacaggccgtgagggagctggtcatacggagacctgcaccagagtgttctaggaagagaagagaacacagcaagtgcaaaggctccgggatgtgagcttgcttggtgcgtcagaggagcagtgtaaggagctgggagagtcagggtcagaatccacaaagccatgagaccatgatgaggactttggcctttcctctgaatgagatgagaagccatcggaaggtttggaacaaagatgggacatgacctgactcatgctttaaaagggtcattgtggttgctataggctgggaacaggaagacctgttagatggctatttccgaaacacacatgctagagtaaggtggcttggatcagggaggtggaggtggaggtggaggtaagtgttggttctgcatatttctgaaggaagaacaaacagaatttgacaatggattagatgtgggggccagagaggatttaaggatgactccaaaattttttggctaagcaactgaaagcttaaaccaaaaataacctgttcctgattgggaaaaaacaggtacaagttctcttatgcgcttggcggcaccctagccctgcacgatgcttatatcctctcttctgccacaggagcttgaagtacggaggttggaagcaaacagagaacttccttttgatcagacgaataatcaaggccggctgttctcaaacttgtttccatagaatgagatttaactaaaatggaaaattcccactgaaataaccaaataaatataaaaataaggaaacatttataacaacaccagaaaatgggaatgtcaataaagtagaaagtgtaatgactttctggaagacacaaagcagatgggatccagctgatggggaagcggctcactcagggcagtgcactctactcagtggaaggagaaaacccctcagagggatagatgagaatcctgaagcctgaagtggcagggactggtagcaagggcaggagatgaaggattttaaggtgaaagctgtgcctgttccctgcacatggaatggctggctgcagtgaggcaggccacatgttggtcagagatagtaggttgccaaagcaacaaccatgaagaagtcatggctcagtagaatagtggaatcctttctttacttcctatggacaaccaacactccaacaagacagactgtcctaagatcattccagaagagactaaaagagtgacagacttagagcagttggtggtcaaagtcaaggacgctgtgacaggtgggtcttacaatactcagtggcttcctaagcaacttctcgaatcagcccttgatctccaaatttcatgactggtggagagacatctttgctctgtctactggtctgtttccagtctacaaacctggtcagcctgtcctgtcttcactgcccacagtggctcaggacaaggtctgtccctgactgactccaaaggccacagaagcacactgggggattcaggacctgacctatacaaccatggagaaagccacccatgcttctcatcctaatcaagcaaactgctgtctataaatacgtgtagccaacaacagctgcagccataaaaatcaccagcctcaatgacatgaaaaggggacaaagccaggcatggagaaagctcaattaaaaagaattactgtgaagaacaggagtgaactgaaacatgattagatgcacattgagattttagaaaaacaaacataagaatgttacaatcacagtagaattctttaatacatctctctctgtattccacagatcaaaaaattcctgatagtgcctagatcaggggttggcaaactatagcctgtgccaaatctggccaatggtctgtcttggtactgcccacaagctaagaatagtttttacatttttacatgtttaccaaaaccaaaacaaagaagaatatgtgacagagaccatctgtagcctacaaagcctaaaatacttaatatctggctctttcagaaaaagtttgcagaaccctggactagatggacacaactggcaagattcagtgtgtgtgcgcgtgcgagtgtgcttgtgtgcacgcacgtgtgcgtatacagaacaaatgtagcagacctgttagtttcaaatgccattgattataaggcctgggaaggctgggactgtctttcacatctttcttgtttgtcaccatatccctgaaacctaggtcagtgcctgcaacacagcagacattcagtaagtatttgctgaatgagtacattgaattttgtacaaaacaatcaattctagaccacaagtaaaacctcaaaatctaaatagaagactgtataggctgtagtgcaatctaatcaaaatcaataacaatctcctgcagctcttaaaatcttacacagatctttattggtatggacagatcttcaagacttatttttgagtaaagtcatatagccatacatataatcttatctgtgtaaaaaaggggaaaaaaatgctcaaatcatatgtgactacgtaaaaagcctgccaagattgaaaactaattatttatagtactatatctgagaactgaaggttgaggtacttttgttttcaataattctgtattttttcttcttatgagcaattatttctttttttaaaaaagcatatgagatatatattaaagagttttcttccatgcatttttctttatcttttgataccttccatcaattatatttcaagcaaaatctaaagaagataacatctgatttagcacagaattatacattagttcttgtacattcagcatatcaattagttcaaagtgttctttatggagtatcatgataaaatgactatatttgagaagaagtagcttagtttatgtgactagatggctgtatctaagacagaactaaatatatctggtgtatactggcaataaataagctcaaaaagcaaggagaaaggacttggaataactacacactcagatccagggcaggttataaaaaaataaagaccagttggaaaggtaccaaattttacttgggtttttatttatttaaaagacagctcgctctaaaaacagttattttcccctttggctgcactttaaaatcacgtgggaaactttaaaaaaggacctctgcctgggccccacccctccagcgccattaaacaggactctctggtggtaggacctgggtgctggcatatttcctaaactccttgttattctaaggtgcagcagaattgagaaccactgctttgaaaggattaatggattttctagtttgagttatgcgtggtggttttatttttagctaataaaagtaagtagaaacagcatgctagtagcttatcttaactatggcttgtgtccaggggttgtggcacattgctgtcagctgctacaggaaaaacaaattggcagttcctttattttgaggggtaagcagatgctctttgaaagccaaatctacaaaactgaaaacataaggtaaaggtaaatgtcataacagcaaatagctgagtcaatatcacggtctcagacttgtgactttgcatagtattaactgtgccaccataaatggatgcagcacacagcagcacgttcttacctattgaaaatcgtctgcagggcctcctcaaaacggcgaagaactttaggagggcttggccacttcacgtgcttcccgtagtctcgcatggtcttgacgccatggaagcgtctggccacctcgtggatgtacgacttcactttgtagcgccggtagtacctgattattgtcagagctgccttggttcttttgtaccgcatgcgggccagggtgccccgccacaccttcacaatagagaaagaaaaaggaaaacgttattgaccggctgagttgtggatggctttgatattatagcagctcctctacttacaaactcaaccaggcaacttgcaagtgtgcacaaaaatcagccagagccaaagcatgtcagttccacctgccaccaacagatggcgtggggagtcacatcagtcattttgtttcagctgtctagctgctcattattctacactgaagtgtgtgctgagcctgaagctgagtcctgttttaactctactgtcatgaaaagaagaaagccaaaatgcaaatatctttggataaatattttaggaatgctgaagggaagcgagatgagtcagaacatcatgccataagcatctatagttttcttgtgaaacctaactttacatagattatacatgctggccactggtgtaacgccactttggatttacaaactgatttacacacagcctgtgcacctcctctcccgcggcactatgtaaactctcaaagattcatgggtaaagggtaaatcagattacgtactaatatcctgtgaatctttgttaaaagtttttcagtgctcacaaatcaatgacactatataaacgcctcaatgccaacttcatccaagcatggtaaagtcagagatacttattttttttcaggatcctttgtcaggtacccatatttctcaacttctcaagcaaaaacaaatttggtgcgatcttcaattaatcactggctcttcccctgtatatcctctccaccaccactttactccttcttccacaatatggaagtgtaaacccctttctttccctttctgctaccagtctccaagatgccaaacaaccctagttgctttcttcgatgaactccttgtacacatcgccatcatgccccagtatatttattgctgctacttaaataactgttccaactcttaggttgattatattatttccctccctagtccctggcctttcagagccaagattttcaacctctagttcaaagcccacagtatgggttctgcagactccctcaggtttcttttatttcttcttaaaaatccccgtctgtgcccaccaattcctctaagcaaaacttgcacaatgcctcatttgactcagttgttttaggtttgtcctcatgcggactcctaaagtacaccatgtgcttgcagtgttctcccttttcagcctgctgcacgatacagatttgtttgcacactacgtgcaagaagatcatcaagggaccccaatgggtcaagaaaaaccataacatttaagggaaacatgacacatgggcaatttgtgatggtaacctagagttcacatataaacagaatgtttaaagacaatgaggcaataaaaactaactcgtcatctcatgtggcgtcagtacagcagccctttttagtcaaaatggctcccttccttgtagccaaatccactgtacagatggctttgttacgcctccacccaagtgcaaaaataaagctcccttctttagcatcttgaaaagccaaaaaaatacaattacagggtgaaagtatgtgatttaatttcttagacaaaacacatttttaagtttcctactgtttgttgcttttttcttttattgggaggaatttaagactccttggagccacatctataaaggatatcaatctttaattttcaagaagtgttttatagagcttcctattagaatgtttttggttagcttctttagcaaattgaaaaaaacattttataagtaagtactttttaagcagtaatttatttcttttacaagaaacctactttataaagggggtcttttctgacaacctttataatttcatctgtgttggcttatttaggtttttaatagttgaaaaaatgaaatagcacaaaaatgcatataaaaaaacacactagcccttctcttcatccttctaaacccacctccctacctccagtctcaatcaacacaaactattttagatgcttcttccatatttactgtcatatttatagataatatggctaggtgtggtggctcatgcctataatcctagcactttaggaggttgaggtgggaggatcacttgagcctaagagtttgaaaccagcatgggcaacatggtgaaaccctgtctccatcaaaaatacagaaaaattagccatgtgtggtggtgtgcacctgtagtcccagcttctcaggaggcttaggtgggaggattgcctgagttcaggaagttgaggctatagtgagccaagattgcaccactgtactccagcctgggcgatggaagtgagaccctgtcccaaaaaaaaaaaatacccccccaaaaaaccacgtatattatgatttcttggttgatccttttagacactatccaaatcacacaagatggagatttagctctctcaccatcattctttcttctcatctaccttcccaatcatagttaaagtatgtttacattacctatattaactctattatatattgaataatttacatatgatatgtatatgttatattgcattgtgttatatattacacatatatttggttcattgctgtgctaagaagtatgaatgttctttctttattgtgtgtatttgtttttacctatcattagtaactgccttgtttttaaaatttgctttatttactataaacctactgctaatttttgccaaatgctcttacagacccatcaaatgattagcagtaatttttttacttgtcaggcacattaactgaatctttttctttgatattacctgtatccactgaacagttccctatcctggggctttttaaactactcttccacgttggatccgagttctcccccaccgccccacgcccagtagctttcaagaaaaggtgtatggccaatacatttctattctcttaagtttccttgaaagtaaaaagcagttgtctaaaatgttgtctgtttcttgagttataaaagcagagtagttgagaacaagctctggactcagactgcctgttttcaaatcctggtcccactcttaagagctgcgcagcgggacgcggtggctcacgcctgtaatctcggcactttgggaggccaaggtgggcggatcacaaggtcaggagttccagaccagcttggccaacatggtgaaaccccgtctctactaaaaaatacaaaaaattaggcaagtgtggtggtgcgcgtctgtaattccagctactcgtgaggctgaggcaggagaatcgcctgaacctgggaaggggaggctgcagtgagctgagatcgcaccattgcattgcagcctgggtgacagagcgagactgtctcaaaagaaaaaaaaaaagagctgtgtaaacttgggcaagcttccttctgtgccttagttttcttagctgtaaaatggggataataatggtgcttaccttgtagtgttatgaggattaatggagttaatacatacgcaacacttaaaatagtgcctggtgagtagtcagtgcccaataagcataggctgttatgactatttgaaagtctgttctttatttacctttagtgggtcgtgctactttcttttctttttttttttttttttgagacagggtctcactctgtcacccaggcgagagtgcagtggcgtgatcttggctcactgcaagctccacctcctgggttcacgccattctcctgcctca[132 bp omitted]tggcttcccaaagtgctgggattacaggtgtgagccaccgcacccggcaattgtgctactttctttttttgtatgtgcagattttttgcctccgtcacttgtcagtgtgacctgaaaactgtttagtaaatgttaagtcattctttctcagtctgccatttgcccccaaacagtgcctgatttgatattgttttattcttccacctataacatggactggtgtccatggtttatacaccttatccagtcattcagttgcctaagaggagaggagagcatgcaggggctttaagtaactgctttacttcattctatgaaataaatgcatcagaggtttgcttcaaatctgggttgtatcataggcttttggcttgttatggggccaagtgttcctttttcatgtctagtggagcttttccttggttcggctgtaataatcattgcttgcagaggctttcctcattttacacccacttattgatatatcagaggcaggaaagatggcaaaccttgcctactcttcttgcttgtgaaagaagtcttcttgatgaaagaaagggtccccgatgaaggtgtggggtattctaagccctccctctggtacacctttatactgaatgtagcaccttcaaaagtagtacgacttttcagaatttcctccttgtacttctccatgctccattcttctctttgaagaacatatcgattttttaaaagcatcttctttcaatttggcccaagttttctttttttggatgacacttctcaaagttgatggtatggagttggaatcttttcttggtttcggggttgatggcatgttctttgttatttttacatttgatatttgttaatcttacacaattctgtgggaaggaaattttgtgaacctgcagttatatcaccaactttatgagaagtcccttaggctctattttttaacatcaaaggacaagcattgaaaactacagaggaaaatgattttacaggaaaaaatgattcatgcattttcccttataatctaagcatatttggtttaaatagatacgcttccataaaagtttgtgtgtatgtgtggcaggagggttgttggttggttttcccaccaagggtctgcagctttggaatttaaggtataagacagattttcctgttttctctctttgtttaaagcagcttaaactgttgagtttgttgagtcatacaaagcttacgtttgtaaaggactgtgcctgatgacaaagcctcagaaagcagaaaattaaatgttatattaaaaaacaagtgcttaatacttatttgcatatggctgagaggttcaacaaacaagggagccaaaaggggccctgcttcaaacaatattaacacaaaagtagaaccagccagacgttacatgctttaggatatgaggccagaggagtgggagctgaaggacacacactgggacctgcgaggtgaagtcagcagaggatatcgggtagagagcatactgacagaggagcaagcaagggaccatttctcagaaaagaggacagcggcaaacagagaggcctgctgacagggaacgactcaggtataaacagagaatgctggcatggcgttgcacacatccttgcaactgaggtgccaattctcaacacagcagccagagtgatccttttaagaccaaagccagatcatgtcacttctctgctcaaactctgcagtggctatttccctgagcagaaaagccaaagtccttcctatagcgttcatggccctatgtggtctgacactgtctcctccccacctcatctcccgctgtcctctcccctgctcgctcccgccatactggcctccctgctggaccctacacaggccaggcatcctcttgtctcagggcttttgtgctagttgctccctctgcctggaataatctgctcccagccatcagatggctgacttcctcattctctgcatctttgctcagtagtcaccttcccaagggaggccagccctggccttctgatttaaaagttcaacttgtctccacctccccgccccccgacccgcccagcactcttaattctccttaccatgctctgctttttctttttcccccagcactcaatcccttccaacatatcacgtaacttacatattatggtgttatttatgctctctcccactagaatttaagggccactaggctggggatctttgtctgttttgctcactgatgtatttccactgtttggaacaatgccaaggacctagttaataatatttgccgaatgaatgaatgtattctacttcatcttccaagtctgatattgaatctttcacttcggctgtcacattttccatcttcaagagctcatccttgctcttgtaatatttcttttaaaagcatgttgctcttactttatgaatgcaacatctcatcccacctctgagtatataacttatggttttattttttgcactgttccttgtattgcacctgttacctctaaatccccagttttcctgtttgtcttagtcttggccttgcccaaggccttcctcaaatgtatagggatcgttggccctccactctcactgaagggtgaacagcccttagaagctctgtataagtgcttcatggatggggaacttcactacagggtgattaggttgggagtagccatctgtggggaaccccagaatgtcaggatcatgaagtgttttctctttcctgccagaatcctcagagtgaaggggtctggggtgggtggtggggggaatcttactcctcagtgtctatactttcatttaatatccttggtctcaatatggtacctgacccctctcctccactaagcctggtgtccctaagttcagaacttctctaaatcctgttcaatttactcagacaagaaacttcttgccatctatcagaatgaggctgaggtagtcccttagctttgtgtggtctggggagagacctagtgtctaattcctctttatatagattttaaccaacctcctctgtcagggccacccctcatccctacctacagaggcacccagtccttcccagtctagaatctttctacagccctacagtcagaacaaggcaaactgtcttgcctgtttgccttgttctctgcaggcacttgcctgggagtaacgactcatttacttacttctaaacttatgctgacacctcttgtcttctgttgtttccactatggtactatttgtcctcgtaggtttatccaatttttattccttttctgctcttttcgagatgttaagagagtggatataaacacaactgtcatgtttaaccagatgtttcataatgccatcttaattctaccattttttcttctgctgcatacttcttcagcagtcagacgtttcaaagcaacatctaacagtcattaaactttgcaaaaaaaagtaggattctaggttgcactctattaagaagtagggcaattatgtatcttccgtttcgtctcagaatcaaacacaggtcagctttcctttttttctcctagttccccatgttttgttttgttttgtttttcaaaattctagtcattatgggcattgggggctctttctgtcttgttgtcaatataaatcactacttcacagctccctggtactctgaattagacattctcttggtttccacaaacagaattgttcaacatttcagctcctagcttctcaggtcctccatgcctaaggacaatttttagaagcatctttcttccatttctatctttaagttccccctatggggatcttcgagatgtccatattgagatgagtctacataatggggaactttgagagtccacattgagataagtctacataacccatatggttatttgggcagagttctgacaccttacggttgttaaaaagttgtggtagaggagggtttatttatgtaaataatgaactctcgttgaatgaactctgagcaaattataaatatacaaaatttggtatggacacattccatcaaatttagaatatgacagtcacattcaatttaggatatttcatgattgactgatgaagggtgtggctctaagagctattttaaaggaagactcagagacagaaaaatctttctgaattattcctcttccatttctataagggacaaaatgaataaagacttgatatgctatttttaaaatgctggtgctcatgtttttaccggactagcaggttaatatgtaacaagaagaaaatataatccagtgaatataatttataggctattagcttaattcctgacacaaaattccttcgttttacagataaattaataatattttggaagacatacgataaatctaagacacaaaagaaccaaatctttagtcaataaacaaatgtaaaaatcattaaaatgaagagccacacacacacaaaaagtacatgtgagtctgatcattacaagccgtcctgatgaacttaactattgcaggtggtggtattggtatgtgcttggtggaacataatttagaagtgaccacccctgagctgtcttaccttggtctgggagactaacttgccgagttaattgacccatgaaccttcgtttaggacatgcccattttatatatatggccttgtccagattcattaaccttgcaattctttagtgcacacaattgctgcctattaatgatttcttcactatgatgatgacatgatctgacagcctccttataactgtaacttcaagaagtaattgaaccttttggtcaattactatcagaagaacagcccaatatcaacactattgaaacccaaatcgcaattattttgcagacaaatgaaaataaaattactccagataataggttaagtaactctgacagattttccaggattcaatcttgtaaacactctgtggagctgtaggaaagtgactgctttcttttgtttggttttgttttcttaaaagaggaggtaaaaacttggtaattcatcttgaaaatctctcaagactatctaaactgcattttgatgtagaactacagagttttggtcaagagtttgagcatctgagcagatccaaagtggtgtctggcaatatttcagctttttcaggagactcctacagcctctaccatctccaagtctacctctgtctgatagcgaggtggcttaccacctggtaaagagtacaggtcaggctttgaccttgtgtgacaaatgcccagcattcaaaacacacagtactccatcaaaataataacacagtatacatttgctttagtggtttgcaaataatctcaattttgactagttctctagattgccaaaatagctgatatttgaaagatccagccaaaggtataccctaacattgattccacagagttctaaaagtacattctggaacacagggcttttggaatgctccccgaaaaaagggttccaatttcaataagtttggaaaagctacatactgcaattccctttatggagattcatggtgtacattagcacattagaagctctgagaatttctttttcttttttttttttttgagatggagtctcactctgtcgcccaggctggagtgcagtggcgtgatctcggctcactgcaagc[135 bp omitted]tcttgatctcctgacctcatgatccacccgctttggcctcccaaagtgctgggattacaggtgtgagccactgcgcctggccgaagctctgagaatttttatgtaaatctcctttaacagaattgaaaaaaaccataactgactacagatttctttgtacacagagtactaatgttgaaggggatcaggatatgccacccaaaattatgccactttggcataaagattattttgagctaaagacaactaagaaatagtagatgtgggaaaagctctctgcccttcccctatctccctgaaaaggatatatttcccatgagaaaagtgccctctccttgtactaggaagataagaacactctcaccaccagagaggaagagtccacatcgagatgagtctacataaataggtcttactaaaatagcctttatcttccattacttcctttcatgcagttcctagtcactttctcacaatttactggccctagaatcccagatcccctatctcatgtctagtcacattttattgcctttctttaaaatggtatataagaccctgagtctaccacttctttaggtttttcacttcttttctgtgaagttcctgtgcatataaaatccttacatcagtaaaaattgtatgccttttctccagttaatctgtcttttgtgagttaaatttgcaggccccaggcactgaatctaagcaggtagaggaagtgttttcctgctctacaatttccaaagaaccaggttctatccttttgggaagcaatgaaatcaaacaaaataaaagaattattcaaataagataaagagtaattataccagaaaacctagactatgaaagctattgtgtataaagcttactttaattaaaagtcaaagcagtaacagaaatggggtattttatacacattttatttagctaataagaggcatacacatttgtcaggaaagacattttctttttcttttttcttttttttcaggtggagtctcactctatcacccaggctggagttgcggtggtgtgatcttggctcactgcaatctccatttcctggttttagcgattctcttgtctcaacctcctgagtagcccagggttacaggtgtgcaccatcatgcctggctaagttttgtctttttttagtagagacggggttttgccatgtaagccaggctggtttcgaattcctgacctcaagcaatctgccctcattggcctcccaaagtgctgtgattacaggtgtgagccactgtgcctggctgaaagacattttcctaaaccaagtaaactcatagaaaatatcattgtatcagtgtgaattttctgattttgataattatactatagttacagaagagaatgctcttgtttttagaaaatatacatgaaatatttaggggtaaagggtattacatgtgcaaattactctcaaatagttccaaaaccaattgtatatatacacacaaatagatctatatacacagatatacacatatacagattgagagagagagagagaaccaaagaacaagcattgatagaggcaggagacagagaaatcctaggcagacataggtgggtccctggtgcgaccttaccttcaagccaaaaacagcttaaagcctgaagtccaagctacaagtcaaatccatggatgagactgagaacctgtcttcccatttggtgtgctttcctttgattgatccccacctttcacctattttacatatacccttccctgtttttacaccatgtccactttcgactggtgcctttgttttaaccatgtttgcatactcacaaaccaattagcatgcactcccttatcctgtgcctataaaagccccagactcagccacactggagcgatgatctgacccgcctgtcccctctctactgagagctgttttgttgctcaataaaatgttctgcctttaccacccttcaattgtcagcatgacctcattcttcttggatgcaggacaagagcttaggaccagatattcagaaaggctgtaacactgaccctctgcctgtgtcaatggagagcagccaccccatagaagagaagcagtggtggtcctgagctggcccagggccatgcctgtcccggagctgcaggccagagtggggcaaaaggctgatggagctgctaacacatccctgtttgttgggctgcagatggcagagctaaaagagctaataagcatattgtaacactccctttggggctctggagtcataggcacccctgcctgggcatcactgcattcccctgggggtaatatgcctggtttggtcatggaccctgcatggagcttgcttctatgttggtgcttggagcggccagccagatcccatactcgctcgcccacgtgctccctcctgccaggggctgagtgcagtgggccaagtagacagggtgcccgggctgcgagtctagcaaaggggccaagaaaaatcctgtgtcaatatgataaagcaaatatagttaaaattttaacatttgggcgctggggcgaaaggcataagaattctttatattattcttgcaacttttctgtaaatctaaaattatttcaaaataaaacaacaggtatctttaagggatagtggagaacaactgcacaatgtatttttaacaattttacataagcaagagtggtcattataccttttttaaaaatttgaattttcttctaaggagtttgttgtacttgtgctttctgaatattggtgagtatatataaaaattgaaaatgatggcaattttatgagtatgtaaattagtctgtgctaatttaaaaaactggaaacatgtttaatggatgctaagttaattcatatgttaacctgcactgagttatatataaaggctgtgccatgtcgggccatattggagcctgaggcaaaaggaaaaagttcaataatatggatcccgtctttatttaaaagtttgatcttttgttcaccacagatttgttccattaatttcagatttttaaaaatattgcatgaacatattatctatcctgaccacatttttggtaccgccttaaattttacatttgagtcctggccctgcataaggaaacaaaaattacagaacaaacatgatgtggtatttggcagattggaggaagggaagggagtgagtgccagtcatgtgctgggctctgtgccaggggacacatgctatctcattttaagttttccaatagtcccaataggcagatgtttttagcattttacaaaggaggatgttaaggttcaaagagagtgatatactttggataacacagtaaatgataaaactgtatcttagctctgtctggctccaagaattgatcatgccatctcctaaatgtatcacacttaaagcagtctaatggtatataaagcaataatgcctattatttaattttccctctgagagacttggacttgctataataattaacaggaagcttggtttcaaacataatccaaactactacactactacattcttcatatatacgcagataattcccaatcataaaggttttttttcgtttgtttgtttttttgagatggagtcttgctctgtcacccaggctagagtgcagtggtgtgatctcagctcactgccacctccaactcctgggttcaagcgattctcctgcctcagcctcttgagtagctgggattataggcatgcaccaccacacccagctaattttaatatttttagtagaaatggggttttgccacgttggccaggcaggtctccaactcctgacctcaggtgatccacctgcctcagcctcccaaagtgcttggattatagccaatcataaagtgttgaattgagtgtgatctctaatggcatcagcacagttttcattgtgctgattgttaataggagtaggtttatagtattccaataataataaagggcagagatgtggccactgagaggaagtgggttttgtacactgcagctgttgcacttagtaaaaggcagagagcatggtttgttgccaaactatatacatattgaaaacttttggcttcgaccatactttaaagaaaaaaaagtctctttattggttagttaaggctttcttcattaactt[134 bp omitted]tccacatcccaggttcaagtgattcttgtgcctcagcctcctgagtaattgggattacaagcacgtgctaccacacctggctaattttttgtattttagtagaaacggggtttcaccgtgttgcccaggctggtcctgaactcttgagctcaggcaatctgcctgcctcggcctcccaaagtgctaggattacaggcatgagccactgtgccccgccaacatgctacattttttaataagagaatgaaatcacagtttggggaaacagttttgaaggaagaaaatatctgatttaaaattttggcaataaaataaaataggaattgatagctgagctaagtcaactttgtgctcataaacaaaggataactaaaaagtattaatgatgaacaaggcttcggaaaaatgtaatacttaaaatttgaagagctgggcatggaggctaatgcctgtattcccagctacttgagaggctgaggtgggaagattgcttgaggccaagagttactagcctaggtgatatagtgatatagcaaaactggataattgtttccagtttccagataatcttttgcatataggcccaatgacacattagatgctcatcgatagttcttaattgttttggggtaactggatttccatccaagtatcagttttgtgtcaatgtattaaattgaaaatatttttgtatctttacaaaatactggtgtttggattattttcccttccagtttttcttgatgtataatatattactgcaatgattagaatgggaaacatctatgatattctaggaagaaccaaatatgcctatgagataactgggaaacaactatgactaattccttaaaagtaagatctgatcaaatgccacaacaatgtcaacttccatgtatgaagcttgaattcctgaactccaaagtgaggctgtttcaacgttctgacgaacagctccttgactggcactgtgtgggggtggagtggaaacggccctactttggaggaagaggcaagcatttcccaccaagtactgggaaatcaggcaattcaaactctataggctttgggttcttcacctgtacactgaggatgcaacattagatgattcataagagcatataccagcattctatcataacagctactgataatgagtaaacattttaaaatgttattgcaaagtttttttctgttccaaagtagacatggaactgataaacactatatttgattttcatctgatgactggtattaccccaagagaagggagagaacacatcgttttactggtatgtgccatgccttgtcctagacacttgacatacattaagaataggttttttttttaaagtacttattcttgacatttgtttgtactgtgctgctgtatgtttcttactaataattcaccataaaaagcagaaaatatatttgacacaagcttctttaagtcatatataatattttcttgctggcaaatgcttggttttgggaaacagtcatttttcagccctatgaagtctgcttctacagagaaacgtaatccatgtttccagtttttgctagtagcctggctcttgttgtaggcattaaccagtgctcttcaatgcagccctgcatcccaaaatacatcagtttccagtgctcactataacagagatactgggcgaagatgcttcctcaaaggggattttagaatgttgcagggaagggaataatctggaaaaggctcccatttacttagggtaaacatcaaacatacttctttttcattttcctgtcttagactgtaattgatagaagggggaatgacaggataagacaatgtatatttattaaggacatactttttcaacagtacaagtttacataatgcaagttgaacataacacaattaactatgaagactgttactggtcataactcaattacaagaagaaaaaatatattgctaagggaatacaactgtgttatttgggtgcatggtttatcataacagtgggtatcagaaatgatcacagtaatgagtagctcatgttggaataatgtgacacagaaataaatgtcactgttatagagaaaaacctagataaagtagaatgctggatatactcctgtgatgttgaagttttatatggtcttcataattaattaatcatgttacattcaacttgtacatataactgtaactatctatcactgataaagtatcatacctaccagaaacataatcttgtgcttgtattacctcatctatttcttcctaaatgttttataacacagtatttgaaaattgaggtttcttaattgagttatataataacaatcaagtcagaacacattttaaataaatgtcaacaggaatatgattaatttttcaatcaacatctattactgttgaatctattattttaaaaataaatttatatcttcttagtaatttgtaattcttttggtgaactgtgtatttctatcttttatccattttctttgggtttctattttattaatttgtatgaattcttcataaattaagtgaaccatccttttgtcactggtgttttgttttcagtatgttgatgatctcttgatactgtttatggtatactgccatacagaggttgtttttaaaaaagttttatgtagtcaaatgtactcatttttcttttatgcctgtgtacatttttatacaaaactatacagaatcatacaatgccttgcaatgtgttttacttgatatatcagaaatattttcccatgtgatcaaatatcctcctatgatgtgattctaagcatccttgcagtactcaaatatgaaattcagttaaccaatcccctattgtgagatatttctgatgttttctcttttttttggagtgatatatgcagtaacattttagtagtatccttgtacataaattcaagcacatgaatgattcatggcaaagttctcaaaacagaattgctgttgtaatccctttgtattttcggctgccacacattaaagccctcatttccaaaatctaccatataaatagtttaaaagaattaaataaattgatgggataatgtagctccgattaaactgctttaattagggttattcaacttttaaaaattcattagctatttagattttttcttttgtgaattgtttctctatttttttttttttttgtccataacatgttcattactttacataatgatctgtaagggctttttgtatatgaaaataaactttttattacatttacaaagatttcttagcattttgccttttatcatttcctggccatggttactggttcaggtcaatgaaacaggaggaattttgctaggtgtttcagagaaaaacgttctctcctgtctgagagaatgtccaagggacttctagaggcgactctccctgaacctagaacctgtggcggctgaaattgttagccgccacctcacaaccacaagggggagccagacttagaaggaagacgacccaagagacggctgaatagaggtttcatgttctgtgaaataaatctgttactctctatgccagtttgaattgcattttctgtatttgcaactaaacatattgtgatacaatgatgttttatgaaaaatagaattttttttttttttgagacggagtcttgctctgtcgcccagactggagtgcagtggcgctatcttggctcactgcaagctccacctcccaggttcacgccattctcctgcctcagcctcctgagtggctgggactacaggcgcccaccaccatgcccggctaattttttgtatttttagtagagatggggtttcactgtgttagccaggatggtcttgatctcctgacttcgtgatctgcccgcttcggcctcccaaagtgctaggattacaggtgtgagccaccgtgcccggccagaagttttaaatttttacgcaggaatatctagcaaactttgcctttgtgaattcttttactgctgctatagttagaaaggccttccctactttaaaatcaattacatgcccatacaattaatttatgtttttgttaaaacattaggggaattgaatcataatgagcagagagcctttattttataatcactccatgaatggcagcagattctgcctattccagtagattatccataattaaaaatgtgtgaaatgcccactaaagctctggattctttgaaatacaaacaagtttttggctacagatgatgaagatggcaggagaaatgttccatgtgagtggtgtgaatctaggtcagcacctggtcaggcaataagaagggttaatatttgaaatctttatatatctcctctgaaacagaggtgtaaaaagtcactgggaagtcatcaggggatatatagatagataaatatatatatatatatatatatatatatatatatatatatatgcacacagacatataaatacattacttgattgcaaaaggcataaagtatgatgaaaagggcatacggtatagtttttaatatatgtcataataaatgagtggtttcattcgaagtcagaaatgcatgtcttgatttcagaaaacaaatcaagactgcttttcaaacgaacacaagcattaggctgcctaaacagttatttctgtatgtgaaccatggaaatattttaggatcatcaaaatctgcccttcttttttgtcttttttaattcatctcaactggcttatgatcaatatttcatggaactcctctatagccgccctccaggtgtccttccagaaaaccaaaacctaaactccagcatagacataaaccctgctgcactgaaccttgaagaaatggatgtgtaatagcatcaaaaagtgacagaagatggacactatggtgaaactgcttaaaaggtctttcaaatgctcaagctctttctcacagcctccttatttatgtatttcctggcttgaattctccctctttgaacttttcctagggttaaatccttcatatctataggtcccagcttaatagcacctcctcagagaggtcttccctgaccatcctctcaaaaatatatttctttttttttttcttttattatactttacgttttagggtacatgtgcacattgtgcaggttagttacatatgcatacatgtgccatgctggtgcgctgcacccactaactcgtcatctagcattaggtatatctcccgatgctatccctcccccctccccccactccaccacagtccccagagtgtgatattccccttcctgtgtccatgtgatctcattgttcaattcccacctatgagtgagaatatgcggtgtttggttttttgttcttgcgatagtttactgagaatgatgatttccaatttcatccatgtccctacaaagggcatgaactcatcattttttatggctgcatagtattccatggtgtatatatgccacattttcttaatccagtctatcattgttggacatttgggttggttccaagtctttgctattgtgaataatgccgcaataaacatacgtgtgcatgtgtctttatagcagcatgatttatagtcatttgggtatatacccagtaatgggatggctgggtcaaatggtatttctagttctagatccctgaggaattgccacactgacttccacaatggttgaactactttacagtcccaccaacagtgtaaaagtgttcctatttctccacatcctctccagcacctgttgtttcctgactttttaatgattgccattctaactggtgtgagatggcatctcattgtggttttgatttgcatttctctgatggccagtgatgatgagcattttttcatgtgttttttggctgcataaatgtcttcttttgagaagtgtctgttcatgtccttcgcccactttttgatggggttgtttgtgtttttcttgtaaatttgtttgagttcaatgtagattctggatattagccctttgtcagatgagtaggttgcgaaaattttctcccattttgtaggttgcctgttcactctgatggtagtttcttttgctgtgcagaagctctttagtttaattagatcccatttgtcaattttgtcttttgttgccattgcttttggtgttttgtacatgaagtccttgcccacgcctatgtcctgaatggtaatgcctaggttttcttctagggtttttatggttttaggtctaacgtttaaatctttaatccatcttgaactgatttttgtataaggtgtaaggaagggatccagtttcagcttcctacatatggctagccagttttcccagcaccatttattaaatagggaatcctttccccattgcttgtttttctcaggtttgtcaaagatcagatagttgtaggtatgtggcgttatttctgagggctctattctgttccattgatctatatctctgttttggtaccagtaccatgctgttttggttactgtagccttgtagtagagtttgaagtcaggtagtgtgattcctccagctttgttcttttggcttaggattgacttggcagtgcggggtcttttttggttccatatgaactttaaagtagttttttccaattctgtgaagaaagtcgttggtagcttgatggggatggcattgaatctgtaaatgaccttgggcagtatggccattttcacgatattgattcttcctacccatgaacatggaatgttcttccatttgtttgtatcctcttttatttccttgagcagtggtttgtagttctcctggaagaggtccttcacatcccttgtaagttggattcctaggtattttattctctttgaagcaattgtgaatgggagttcactcatgatttggctctctgtttgtctgttgttggtgtataagaatgcttgtgatttttgtacattgattttgtatcctgagactttgctgaagttgcttatcagcttaaggagattttgggctgagacgatggggttttctagataaacaatcatgtcgtctgcaaacagggacaatttgacttcctcttttcctaattgaataccctttatttccttctcctgcctgattgccctggccagaacttccaacactatgttgaataggagcggtgagagagggcatccctgtcttgtgccagttttcaaagggaatgcttccagtttttgcccattcagtatgatattggctgtgggtttgtcatagatagctcttattattttgaaatacgtcccatcaatacctaatttattgagagtttttagcatgaagggttgttgaattttgtcaaaggctttttctgcatctattgagataatcatgtggtttttgtctttggctctgtttatatgctggattacatttattgatttgcgtatattgaaccagccttgcatcccagggatgaagcccacttgatcatggtggataaactttttgatgtgctgctggattcggtttgccagtattttattgaggatttttgcatcaatgttcatcaaggatattggtctaaaattctcttttttggttgtgtctctggtatcagaatgatactggcctcataaaatgagttagggaggattccctctttttctattgattggaatcatttcagaaggaatggtaccagttcctccttgtacctctggtagaattcggctgtgaatccatctggtcctggactctttttggttggtaaactattgattattgccacaatttcagatcctgttactggtctattcagagattcaacttcttcctggtttagtcttgggagagtgtatgtgtcgaggaatttatccatttcttctagattttctagtttatttgtgtagaggtgtttgtagtattctctgatggtagtttgcatttctgtgggattggtggtgatatcccctttatcattttttattgtgtctatttgattcttctctctttttttctttattagtcttgctagtggtctatcaattttgttgctcttttcaaaaaaccagctcctggattcattgatttttcgaagggttttttatgtctctatttccttcagttctgctctgattttagttatttcttgccttctgctagcttttgaatgtgcttgctcttgcttttctagttcttttaattgtgatgttagggtgtcaattttggatctttcctgctttctcttgtgggcatttagtgctataaatttccctctacacactgctttgaatgcatcccagagattctggtatgttgtgtctttgttctcgttggtttcaaagaacatctttatttctgccttcatttcgttatgtacccagtagtcattcaggagcaggttgttcagtttccatgtagttgagcggctttgagtgggattcttaatcctgagttctagtttgattgcactgtggtctgagagaagtttgttataattcctgttcttttacatttgctgaggagagctttacttccaactatgtggtcaattttggaataggtgtggtgtggtgctgaaaaaaatgtatattctgttgatttgggttggagagttctgtagatgtctattaggtccgcttggtgcagagctgagttcaattcctgggtatccttgttgactttctgtctcgttgatctgtctaatgttgacagtggggtgttaaagtctcccattattaatgtgtgggagtctaagtctccttgtaggtcactcaggacttgctttatgaatctgggtgctcctgtattgggtgcatatatatttaggatagttagctcttcttgttgaattgatccctttaccattatgtaatggccttctttgtctcttttgatctttgttggtttaaagtctgttttatcagagactaggattgcaacccctgcctttttttgttttccatttgcttggtagatcttcctccatccttttattttgagcctatgtgtgtctctgcacgtgagatgggtttcctgaatacagcacactgatgggtcttgactctttatccaatttgccagtctgtgtcttttcattggagcatttagtccatttacatttaaagttaatattgttatgtgtgcatttgatcctgtcattatgatgttagctgatgattttgctcgttagttgatgcagtttcttcctagtctcgatggtctttacattttggcatgattttgcagcggctggtaccggttgttcctttccatgtttagtgcttccttcaggagctcttttagggcaggcctggtggtgacaaaatctctcagcatttgcttgtctgtaaaggattttatttctccttcacttatgaagcttagtttggctggatatgaaattgcgggttgaaaattcttttttttaagaatgttgaatattggcccccactctcttctggcttgtagggtttctgccgagagatcagctgttagtctgatgggcttccctttgagggtaacccgacctttctctctggctgcccttaacatttttttcatttcaactttggtgaatctgacaattacgtgtcttggagttgctcttctcgaggagtatctttgcggcgttctctgtatttcctgaatctgaacgttggcctgccttgctagattggggaagttctcctggataatatcctgcagagtgttttccaacttggttccattctccccatcactttcaggtacaccaatcagacgtagatttggtcttttcacatagtcccatatttcttggaggctttgctcatttctttttattcttttttctctaaacttcccttctcgcttcatttcattcatttcatcttccatcgctgataccctttcttccagttgatcgcatcggctcctgaggcttctgcattcttcacgtagttctcgagccttggttttcagctccatcagctcctttaagcacttctctgtattggttattctagttatacattcttctaaatttttttcaaagttttcaacttctttgcctttggtttgaatgtcctcccgtagcttagagtaatttgatcgtctgaagccttcttctctcagctcgtcaaagtcattctccatccagctttgttccgttgctggtgaggaactgtgttcctttggaggaggagagacgctctgtgttttagagtttccagtttttctgttctgttttttccccatctttgtggttttatctacttttggtctctgatgatggtgatgtacagatgggttttcggtgtggatgtcctttctgtttgttaagttttccttctaacagacaggaccctcagctgcaggtctgttggaataccctgccgtgtgaggtgtcagtgtgcccctgctggggggtgcctcccagttaggctgctcgggggtcaggggtcagggacccacttgaggaggcagtctgccggttctcagatctccagctgcgtgctgggagaaccactgctctcttcaaagctgtcagacagggacatttaagtctgcagaggttactgctgtctttttgtttgtctgtgccctgcccccagaggtggagcctacagtggcaggcaggcctccttgaactgtggtgggctccacccaggagcttcccggctgctttgtttacctaagcaagcctgggcaatggcgggcgcccctcccccagcctcgttgccgccttgcagtttgatctcagactgctgtgctagcaatcagcgagactccgtgggcgtaggaccctccgagccaggtgtggcatatagtctcgtggtgcgccgttttttaagccggcctgaaaagcgcaatattcgggtgggagtgacccgatttccaggtgcgtccgtcacccctttctttgactcggaaagggaactccctgaccccttgcgcttcccaggtgaggcaatgcctcgccctgcttcggctcgcacacggtgcgcgcacccactggcctgcgcccactgtctggcactccctagtgagatgaacccggtacctcagatggaaatgcagaaatcacccgtgttctgcgtagctcacgctgggagctgtagaccggagctgttcctattcggccatcttggctcctcccccatctttttaaaagccaaaaatgtatttcccttgtcctctgaatgcttgcctcgctcagcattttctttccttcatgactgttacacaatttgtaattatgtgttcactcatgttttgtgtgactagaatgtgtaatccatgaggacaaggactattttcattttatttattcctgtatttccaaagagtacctagcaataaacacatttgctgaaggaatgattactggcttgaatagactaaatatctttatttgaagtttaaagactcgctgatctgtaaaaaggccctgtggaagtgttacatccaagggctcagtaaccttagggtataagagcactaaaaagaaacagcccatcctattacacaactgtgaggatgagccaagcaaactatgaaacattcaaggaagaaaatacatggcagctgtcatgtattttctcaagtctgaagagaatttcaaattcactgttgacggttgatggttctacagcagactagcatgaataagcatcaacttgaaaaactgctgccaatttgccaatgaacaacttgatgcatgaaaatgtctgattttcaatgaattttccttttacataaaaatttcactgaaaatacaaactcttcatcttaaatcagctggttctgttagagtatgaaaatgtggatgttctaaattaagttccggcttccctattcattctagttacaggattttttcatggaaaatttctctttatcatttttttttggaaaaaaaagtcaatacctcaatgtcactgcattttatcaagtgaccagggaaaaggtgcacatccttattctctctcttaaagtcaacaagacctagaaagcaataaacgctgtgtgtcattcattttttcactgggcctgtgagaatgatataattcctctattattggaatgagagggaagaaaaaaaattagactgggaaattctatcaaactcaagtattgtatactggttctcaaattaactccaagtaatgcgtaaggaaacaactcttggttggattatttagatgaactagatacccaagctcataggccaaagatgacatgagaaaatactgtaattaatatagctttggcttcaagaaagcagctggtgagcaatctccaggttcacttctcatcttgagaggctatctagcagatattctgttcttccaaaggggcagaaaacccttgcttctttttcataactccatggaatccactgtttaactatataatggcaggtagcctaaaggagtcctggagtttccatgtctgtagaggtttttcccctaaataaaaaatcctagaacaggttttctacgattattagattcaggaatatatgtatttagccagactaggcccacaatagacagagctccttgatttaaccatcaaataagaactatagaaaactgtcctattactaaataactttgcttttaattctggattttcttcttcacccaaataagtacgttgctaacttagctttaagttattgtcatctacagagaaccccatgctcggttacattatagttgagcaaatattcacttctgccttcttgacctccatgggttatcccattgatatgacctgctttggccaatgcgatataaattggataaactgagccaaaattgaccaaaccctagatgcatgagcaacaaataaattctgactgttatatccaccaagttttagagtgatgtggtaggctgaacaatggtccttaaaaattagccaaaatagccaactgcaaatctctgtgaacgttaccagctttaagttatcatcatctacagatctgtggaagggggaaaaaaaacacacaaaaaaacaaaaacaaacacacacacacaaaaactttgcatatatgattaagttaaggattttgagatgggcagattatctgtttggaccttaaatgcaatcatatatatccttgtaaaacagaggcagtggaaaatatgacaacagaagagaaggcactgtgaccatggaggcagccacaagccatgggatgctggcagctaccagaagctgggagaagcaaggaatagattttcccctgtaacctttggaagaaatgtggtcctgttgacattctgattttggcccagtgaaactgatttcaaaccttcctccagaactgtgaaagaataaatttctgtgttttaagctgccaagtttgtgataattttttttgcagcagccttaggacactaacgcaggtggtctgtcatgtaactgtgacaatagttaactattccaatgaatggaaacccaaaccattcattggctcatgcctgtaatcccagtactttgggaggctgagacaggaggatcatttgagtctaggagttcgagatcagcctgggcaataaagtgagaccctgtctgtacaaaaaataaaaacaatagctgaggtggtggtacacacctgtagtcccagctacttgggaggctgaggcaggagggatcacctgagccccagaggctgaggctgcagtgagccataatcacactactgcacttcagcctgggtgataagagtgagaccctgtttcaaagcgggagggattgcttgagccctggaagttgaggctgcagtgccataattgtgccactgcactccagggtgataagagtgagatcctgtttcaaaacacacacacacacacacacacacacacacacacacacacaccaaaaaacaaagaacaaaaactaaatacacaggtacttacaaagtgttcaaattctgtcaaatgtattaacttatttaatacaactatactatgaggtgggtactattttatttcccccttaccccccgcccgcaccccagcctcctgagtagctagtaccacaggcaagggccaacatgcctggctaatttttttttttttttttctgagacagagtctcactctgtcacccaggctggagtgcagtggcgcgatctcagctcactgcaagctccgcctcctgggttcacgccattctcctgcctcagcctcccaagtagctgggactccaggcacctgccacc[131 bp omitted]caccgtgcctggcctcgcctggctaatttttaaaattttttgtagagacaggatctcaccatgtt[134 bp omitted]tgcttggtattactaaagtatctcatttaaatgcacataaatagctcttatatattcaaaaatatctttgctttcatacataacatagctaataagaaatcttgtaaatccagaagcaaattattacctagtattgaatcatgataagtacattattgacgaaatgttacctaagactactgggtacagggcatgatgctgggagtcctctgtggaacataatcaagtacaaggattctgctgccctccataatttataatctagctgaagagatcagacacatctgcaaaattaataaatgatctaagatttaaacactggttaaagactacaaaaaatacagaatccaccgggaatttctgagctaaagactccttataagtcatctatttgagaggttctctgccccgcctcttccatagcatagcttgggaggaacattcatatgcgcaacacctttctgggagctgtgcaatccctgagatttgccttccttgcccactcaagaaagcacgtataaattccatgggaataaccttgaatcaactcctacttgtaaaatgattcacaatcttcaaaaccttagtaaaaaattacctgcaacacacttcacacttgatcataatagatatgcccacaccatccctattgttttacagacaaatgaagtgagaatgacctaaaaccttacacgaacgtaaatcctacaataaaactaacagcaggcacattgttcctgcttccctttgactcactgtctcatacagccacatacaactgacaaatgggttctggcaaagatgtaaagatgactttatttacagcggtctggttgggaggactttagtgaggaggcagaatcgaacttgaagaacactgtaagcaaggcaaacagtatgtgtaaaagtatacatacaggtgaaaaagcagagatgtttgagggttcagtaaaaacaaacaatgtcgtgctatggcatcacaggagacgtggttggttggagccagactctgggaaagtctagtcttaattttgtgggtgattgaagggtttttgaacggagacacaacaccataaaacctaagattgtgatgctgtgcagatccaagtcaagggagggagcctgggagatcacacagaagtggtttaggggcagagtaccacaaccatcaccacggttctgctgattttcaaatggtaatactcatttacagtgcatatggtctctttgatttttgaagtgtgtgtgtgtgtgtgtgtgtgtgtgtatgtgtgtatgtgtctgtgtgtgcgtgcatgtaagagagtagaacaaagactggaatgatatatcccaaaacgttaacagtgattttcttttggtggtgagatgatgggtaatattattctcttctttaaattaaaaatctttcacaatgaacatgtattaccttataataaaaactgttacttaaaattttaggctgaaataatgtgatcatagttatatgttgtttataatcgatttaaagtacaataaactcatgaatacagtactttgtttgtaaacctgcatttaaattataaatgcttgattatattttgagttccccaaggatacttgtcaccaacatattttctatgagtgtttggtttcttatccacacaaatacaatacaaccaactcaggacagctgagtagtaaacatcttattttgaaattgaatttcttaaaaatactgacgctcattatagtactaagtttgaatagatagcgatgtttgacaacattaagactttaacaaaaactactgaataaaaatagtcctaattttccttagttacgaatgatgcccgcctagccaccaaaagtatgactcatcacgtcctcttcagtaaatataatgggtgtgtgtgtagatatttccagaattaacaatgtggttaaagaggaatcgcattgaatatcctgttttgtaacatatattttcacttaacatttatgaagaacactcttcattttgttaaaatatcgtcattattaatggctgcatagttttcctgtctttttttttttgagatggagtctcgctctgttgcccaggctggagtgcagcagcacgatctcagctcactgcaacctctgcctcctgggttcaagcaattctcctgcctcagcctcccgagtagctgggattacatgtgcccaccaccacacccagctaatttttaatttttgtatttttagtagagatggggtttcaccacgttggtcaggctggccttgaactcctgacctcaggttatccacccgccacagtctcccaaagtgttgggattataggcataagctactgcgcctggcccatagttttctattgtatagatacatcataacttatataactgttttcctgatatattttttacttatatataggttatgtgtgagtgtctgttacatacatagaatgtataaagatcaagttggggtatttggggtatccgttcccttgagtgtttatctttttttttttttttgagatggagtcttgctctgtcatcccggctggagtgcagtggcgcgatcttggctcactgcacctcccgggctcaagcaattctcctgcctctgcctcccaagtagctaggactacaggcacacgccaccacaccagctaattttttgtattttagtagagacagggtttcactgtgttgcccaggctggtcgcgaactcctgagctcaggcaatctgcctgacccggcctcccaaagtactgggattacaggtgtgagccacagcacctgaccgagtgtttatcatttttatgtgtcggcatctgacatggtttggatgtctatccccttcgaatctccagttgaaatttaatccccagtgttggaggtggggcctggtaggagggactggatcacggagcagatccctcatgaatggcttagtgccatatcctttgtgatgagtgacctcttgctctgttagttcatgagatgtctccctctcttgctcctgctcttgccatgtgatgcctgctccccctctgccttctgcaatgattggaagctctttgagggcctcaccaggagcagatgaccgcaccatgcttcctatacagcctgcagaaccatcagccaattaagcctcttttccttataaattacccagccacaggtatttttttaatagcaactcaagaacagactaacaccatatcctttaaagtcctcttttctagtgactttgacttatacattatattgttgctaagtacagtcgctctagtgggctctcaaactttagtatttatttctcctcatgcttgtaacctcagcactttgggaggctgaggtaggagcatcactagagcccaggagttcaacaccagcccgggcaagatagtcagaactcatctcttaaaaaaaaatttagccagatgttgtggcacctggctgtagacccagctactggggaggccaacacaggaggattgcttgagcccaggagttcaaggctgcaacatattaggatcataccactgtactccagcctgggtgacagagcaagaagacactgcctcaaaaaaaaaaaaaaaagaacttatttcttctatcttactgtatgtttgtactcatagccaatcgctcttcatctccactaacttcttaacatttaagagtcttcattatttcccactgtcatgagaaatgttgcaaagaaaattcttttttttttttttttttttgagatggagtcttactctgtcgcccaggctggagtgcagtggtacaatttcagctcactgcaacctctgcctcctgggttcaagcgattctcctgcctcagcctcccgagttgctgggattacaggcgcctgcccctatgcccggttaatttttgtatttttagttgagacagggtttcaccatgttgaccaggctggtctcgaactcctgacctcaggtgatccgcccaccttggtctcccaaagtctgggattacaggtgtgagccaccatgcctggccacaaaaaaatttcttacaactaaagttttacatatattcttaagattttccttagtattaatttctagaggtataattgctggattagaggcaaatataatttttagattttttggaaacacattgccaaactacccctccagaaagttctcaccaatttactcttatgccagtagtgtacatccttagcaacactgtgtatgatattttgaaaaatcccgagtatttggtaggtgaaaatatggttgctggccatttttcttcttctgtggtctgagtgtccatatttttgttcagttttctagtgaggtatctatctcatttcttaggagggaccttttgtatattaaaggtattcataatctgcagttgctgaaatttttaaaaatatagcttaagactgctatatagctcctcgttaatagaaactgaatgctctaaatatacacatttcccagaacatgttgaatatttcataaactttctgttttaggttagcaaaacttgatagtccaagcagaatgtgtttacatgtgccatgacaaagaatatgagcaatttttgatacacttagatctcttggtagtagttatatacatttgctatagcaagaagagaataaaataaacctcaatactgtaggcttcacacttaaaccacatgtatgccattatgtacctaacttggtaaacaggatatattttgtcacccataaagtttcttagctcaatgaaatacgtggcaaaattacatactttagaaaagctgtttcttttcataaaagtctgttcaaaaaaatcttttttagggtgatattttacattaaatgtcagcatggtgactaagcagtgaacggctattacaataaaatattttcatcattgcctttaatacttgttatctaattatttttaaaaggattagagggaacttacaaaaaaaggtatacagacaactaaattaccaaagtaagaataaaaggacagccgggcaacaggggcagggtggtaggaaggaaagggagtcagttccactgaaactcccaaactgaggatggttcctggacttacatataaatctgagccctgagcttcctggcatctacagcaaacaggaaacttaatgagttgcaaggatttcatgatttaataggcattctttaataaggttgataattaaatactccctccaccaaaatatgctctttttatttttaaacaaatgttttattgttggcaaggaagaaaaaaataattgctcagcagtaattcactgggattttacatggcttggctgtgcgcatcttcagctacctctgtaatacagtcttcctccagacaagcttttgattgtatacatcttaactataagacctttcatttgaggttgggatagcaattctcattaaattgttcagaagttttgtaatttaatttaagcatctattcacgaaatcacttccccttcattaattaattccttacaaagagtcaaatctcttgagcttgtagcaattaaaaaagaaaagtgaaatgaatatgtagccatttttttttccttcctttttttcctatcaccacctataggggccagaaaatgttgtcatggagacaacagctgttgggttatgagtgacaagtctcaagagagaagtgtcttggaaagggaacacctcaagtaaaaaaaaaaaaaaaagtggtgagggagaaaccaatgcaagctgttttactaaacatagtgggggctcaattgaaaggtgtattttagctagcaaagaataaaagtggtatttcccctcttttttcacctaacataggaaatgttttccttgcaaaggcgaacagatttcttttaagtaaacctcaagcatatgtacatctcttggcataattatattttaaaattgagattcacactgatgcgccaaattggttgccttagtaatgagatatcacccaggcaacggatttgctgctctttcaggagagcaaatcatctgcttccaacttacagcagagtgggctggggatggagtggcaatggtttcttattggcagtgtctgagaggagataaataagaaacaaattatttttgacatgtcaccattattttccaaatatgcttttatcgttttattcaccaagtaggtgggaagagaaaaaaggagagtggggccgggtgtgagggaatgtactgttgcttcaatgttaagttgttgctgaagcatttttattgttctaaaagggctttacatttgccaatatgttaaatactaaatggaccagttataggcttatattataaatcgaccaaatttttttccccatagtaagttcagtgacttgtacatagtaatgctattctaatagcgctgcttagtaatatatgtaggggtaagtcttcagtgtttcaacatttactaaatgtcttacggaaaattaacgcttcttagtttcttcattacggacacctttttgctatacctattttcatttccatgattcaccaacaaatgttcaaaacacttttatttcctcgccggaggagtttggcaattggtttttcttctacactctgagctcatcctgacccaactttaacatgccggttattaataaaccaatgacctactaattgccagactaggtgggcacttttcagccattatggtgttgga[181 bp omitted]gtggcgggcgcctgtagtcccagctactcgggaggctgaggcaggagaatggcgtgaacccgggaagcggagcttgcagtgagccgagattgcgccactgcagtccgcagtccggcctgggcgacagagcgagactccgtctcaaaaaaaaaaaaaaaaaaaaaaaaaaatttgctacttcttttgtttctctgactcatatatccaactgcttgctggtcatctctacttgaatgcctcataggcacctcgaacacatcataccccacactactaccatcttccagatatgcccctgcttctgtaccttctacctctatctcagttgtcagtgataccagctatccaggactctatggtggaaacctgggaatcattgattcctgcctttcatcaatctcctgtccaataactatcatagtctgctaattatttcatggtctcctaaatatttctcacatttttctgcatcttaactaccactgctgcaatttaagttctcatcagctttcccctagatcagtggtcttgaacctttttgacatcagggaccagttttgtggaagaaagattttccatgcaccggcatggtgggggtgggggtggtttcaggatgaaactgttctacctcagatcatcaggcattagattctcataaagagcgcacagcctagatcccttgcatgcgcagttcaccataggcttcatgctcctatgagaatccaatgagccactgatcttacaggaggcggagctcaggtggtaatgtttgctcacttgccgcccacctgctgctgtgcggcctggttcctaacaggccacagtccagtaccagtctgccacttggggattggggacccctgccttagattacagcaacaggctcttaattggccatccttccttgtcttattgacttctaatgtttccttgacacagatctatttaacagtcacaaactgaccacaccacttctctcttaaacttccagtaggacttccaatgagtagggcaagaaggtagaatagataacttgatatccctactgctacaacaatgtaacaaatacccctatgcacagctgagcttgtaagaaagtaacggtcatattcagggatcaaaatttgattggccaaaattaaaaaatctgccaatgtgaattgttgataaggatgtagaagaataaaagctttcatacatttcttggtgagcataaactggtacaattattttggaaagcaactgggcaaactttagtgaacttaaaaatgtgcagactctacaatctagcatttgcaatctggggtatatacccaagagtagcagttctcaaagtgtggttggggaaccctgagcactgctgagaccctttacttttaggggatcttcaagataaaaactaattttctaagaataccagcaggttatttgccttttaaattctcaccctctcagcctatgatagaattttccagagactatatcacatgtgatgacatcatcactctgatagctaatggaatatgtgcttgcatattgttgcattttgtagaattttctaaggtaagctctttagaattctcaaaatttgagaatggcagccccacagagacctattcacttgcagacaagagaatatgtacaaaaatgttcactgtggcatttcacagaatgacaaaaaactgaaaaactgactattattaggaaattaactgtgacttttaaatagtaaaataacaagcaaaagtaaataagccattagtacacttatggacctatacaaattttaaaaacattattctgagtggaaaaaaaaacaacttgcagaagactatggacagtataatgtggaaacagaatattatacactatgacaaaaaaagtataaccaaattagaggctgccaagctcaactagtagttagtaatgaggaaccttgacagaatgggagtttgttgatccaggtgctttaagaagacaagtcctgagctagctctttacatcttgttagataaataaggaaagggttagtaaatatttatatacctgttataaaattcaagttattctaagtttaattctgtccttctacgtggcactgctgccacatgtgtttgcttgctagttacccatttggctgtttgctatgcagggcaagcactttcctgtgatatggaaaggctgttttagtaattccaaagactaagactagtctatgtttgttacagaaaacaatatttgtttgaatatttttgtagaaaactttgctttctacatttgtcaaaggaagtccattttacccactagctttagtgacagttaacccactataatgtcaagttccagctctaattaactcaatctgtataaatggcttatgaaatacagattaagatctgtcctccctgttaatgtgtttccaagtaagatgtgaatctaacagagttaattaagattttggcaaacttcttccagaaagtgtcctctccccagctcaggtaggtgcctcttctctgagcccaccttgcagtcactgcctactaccctagggcctcgtaattactccatttcactggtttgggtgcacacatctgccccctggctgggttgtcagcttctggatggagctttgtcttgttccttttcatgtttccattcagtaatgaatgaacaaatccacatttattactcattttaaaatgcatgtgagcaccttttcctgcatagccacatgtcacagtgttgtaaatgctacccatttcttctcacagcatactggaaaaatacggagtcaatggccaccattcaatcaaaggtacgcttttgtttctttcaacactcagtcaagaccaagcagcatatttttgaccataaatattccccatcaataaagcaatgaatggactagcattgggggcaacctctttcattgcctagtagcataccccagcttcctgtttcagctgatgctttcttggtcgctttgtaaatgcacctttcccaacctagccatagctcgaaagtcactttttccaaaacaaacaaaaatctcttctcctggagcatgtattttcagttaaaaaaaaaaaaaagtcatcgatcactttttgttactatacacgtgtcaagagctgattcatacatcaacatcagggttttttttccaattgtattactgtatcttagtccacatacttgacagtgaataactcagaagacattaccactttaccaaggctatttaataaagcaattttgcaaattgcattctgctttctttgtgagcatgatgcacatcacctttgaggacatcctctgaacacatcacctttgtgactagtttttcaaacttttcaatagtgtgagtcatagctgtttcttgaatgatgccactatggtacaaaagtgtacagcagtcaaaagagtgtgtgtgggaagcaggcctcttaggttcaaatcccagctctggtgtttaccgtgtgtgacctctgccaaggtccttaaccactcagtggctttagctcccttatctattaaatggaaataataatggacactcattcacaaggttcttgtaatgacttagttaaataaccagaatagtaaagtatccagagtagtgcctatcactcaggaaatactagctaccatatcagtaggttttgtgttttctttcttttctcttttctttttccttccttccttcttccttccttcctccctcccttcccccctctccctcccccttccctccttccttccttctttccttccttcctccctccctctcttcccccctccccctcccccttccctccttccttcttttcttttttaaggacaaaagtaatcaattttatatgagaaataattattttgcttttagtcttagaaataaaacacttgattggttttacaaagaagtcagagtgctttgtttagaaatcatatgaaagcccccatcacttcatgtctctatctgacagtttcctaacaaataaaacattaggcaaatgaatgacaaaaccaataaaatccaattttcagataatgattctattcatactttttcttttggctggtttacaaaattatcgtactcactgaaaatgattacactatattaatctttgagtctacttataattaacagttattatattattctcagtttcagaatttactattttcattatatgtttatgctttaatgagccacttttaatccttcacaagatctttcttgtgataagggagctaaagccataatataatccaataataaaaaatgcaaaatgcaaatttaacaaataaatataagaacatataaataatatgaaattgttaatttagacaaactaaagacgccactccttgccatacataagccacatttattttattttaattttaatttttttcaagacaagtcttgctctgtcgcccaggttggagtgcagtggtaccatcttggctcactgcaacctctgcctccggggttcaagcaattctcctgcctcagcctgaatagctgggattacaggtttgtgtcatcacgcccggctaatttttgtatttttagtagagatggggtttcaccatgttggccaggctggtctcgaactcccgacctcgtgatccccctgcctcagtctccaaataagcactgggattacaggcatgatccaccgtgcccagcccataagccacctttaaaacattcaatttttaaagatgaaatgatatgtcactgaaaatcataattaatattacatatcaagtttctgaaatatatgggaacaaaactcccaaatgacagagataactgtcagactgccaggaaccactcactgccttaggtgttgatgctgccctttgataaagatgagtgtgctcctttctcaatgctgtctcagctctgggggtggccacgcctatccctaaccatctgtgaaaagatagtttccagtcaactgggaacaatgaacagaaactattaattattaattttatatggtatgataacagtatgaagtccttatctataaagtccttatctgtagattggtatttaagggtgacaaaagatatctgggatgttctttaaaaacttcaaccaaaccaaaacaaacatacataaaagcatgaggtgggaattagataaaataagaatgacaaaatattgttaattgttgaatctgggtgatggaaacatggagattcattaaactgttcttcctatttttgtgaatatttgcaattttccataataaaaatattaaaaaataacatataccttatttcacattatactcacaaaaaatcactgtacaccaggccctaaagtaaacctcaataaattccagaaagtagaaatggaacatttaacattctgtgatcataaagcagtgaaactaaaaaattaagaacaaaattagaaaagtaaagaaaatacacacacaaaacatgtatcacctggaaatgatttaaaaaaatttttttaaacaactttcagggaaagagaaaatgtaaacataaaaaataattaaataataatatatcaggtcctacagatcagcagtctccaactttttggcaccaaggaccaatttcatggaagacagtttttctatggactgggaggtggtaggggatggtttcgggatgaaactgttccatcagatcatcaggcattagattctcataaggagtgtacaacctagatcccctgcatgggcatttcacacacaacagggttcctgctcctatgagaatccaatgccgctgctgatctgataggccgcggagcttgcttgccctctgctcatctcctgctgtggggcccagttcctaacaggccacggaccagtaccagtccgtggcacaagggttggggacccctgctacagatacagcagaagcagatccacaaaaaatttcacagttcattactaataaatgtgaaagaaaaaactgaacgaagtgttcaactccagaagttggagaaagataaactgattgcctctgctctttatattccaaaaaggagaggaattgatgaagataaaaaaattaacaaattagaaatcagaaaatgggctgggcacggtggcttacacctgtaatcccagcattttgggaggccaaagcaggtggatcacttgaggtcaggagttcgagaccagcctggccaacatggtgaaaccctgtttctactaaaaatacaaaaattagccaggtatggtggtgtgcgcctgtaataccagctacttgggaggctgaggcaggagaatcgcttgaacccaggaggtggaggttgcagtgagctgagatcacgccattgtactccagcttggatgacagagtaagactccatctcaaaaaaaaaaaaaaaagaaaaaagaaaatagtagaataaataaatcagaggtgattttttgaggaaaaaataatacaatacatcattaactaaagctgataaagaaaaaagataataagcataaatgaaattcacaaaataagaaatggtaagagggaatgactacagattcaaaggaaatgagaagaaaatgtaagagactacttcgttcaattctgttcaattaaattagagaatctgaatgattttctaggaaaatataaattaccaaaattaatcccacaaaataaaaacagatcaattatcacaaagaactagagtaagctgttgaagaggtacactccaacaaatacccccttccagatggcttcacaagggagtttaacctcaaaagattaactccaaggctatttagactgttccaaaatacagacaaaaaaagaaaagtgtccattttatcttgttaggtaaacatcatattgctatcaaattggttagaattctctgtattgataattcaagagaaaaaaatgacataagcatcttgatatctgttgaaaagtaatttgatataattcatctattcttgatttttaaggtacattactctttttaaaatttatttcatttttttttagagacagggtcacactctgtcacttaagctgaagttcggtggcgcaatcatgtcttactatagcctagaactcctgggctcaagtgatcttcctgcctcaggcttctgagtagctgggactacaggtgtgctccactatgctcagttaatattttatttttatttttgtagagatggggtttcgctgtgttgcccaggctggtctcgaactcctggcctcaagtaatagtccagctttggcttcccaaagtgctaggattacaggggtgaacccccatgccctgccaaagtacagtactcttaacacaactggaatagatgactaccttagcatgtctgcatgttcaaatgtatctatgtcaaccagtatcaatcaaaagtagaaaccactagaaacatttcccttaagtgcaggaatatttcaaggctgtctaacatcattgcttaaggaaagctcacaagcaggctacacagcagcctggctcctccccataacatgcctgccagtttgaggacagtggcccaggagaagtacagctaatcctgatataagaacagaaaaaaattttcccatgaaccagcacaaaaatgatgctgagttttacatgcttctgttatttcctttcccactattatacttgtgtgcatatatgtacgtggtgtgcctgttatttgtatatacattatgcctgcactgatttattgataaaatcacataccctatttttgaatattttcataatattagtttgctaggggaatgtcaaatgtttattattttgaattaagaaaagatccctaactaccctataattccactttgaattccacataaaattagaaacaatcatataattttagcctatatcttgaatattttatttcactagcttgaggcttttttttccctgttcttggctttatctttttcatatctttttctctttcacgtctttccacagactttcttctccactcattcctttgtccctcctcgccccccagtgctattctgcttttggaattgcatcaattttgcaatgatttaataatcaaattactatcatcctctaattaggaatctaccagataggcaaaaatacattctggggactgaatgcatctgaatatttatagcaagtatttctattatttcctataaagacatgtctgtagtttcacacaactacaatggaagactgccaactgacttcaaattcaagcttgactgtggaccccacagttcactgtatcatggatgctacaagctgcgagccacaattaggcctgaaataaaaactggaaaactcatagcatggaacatggagcaggtaaggggtagcataatttaaatttccaaagagttgacagttcttgctgctgtagaattcataagctgtaactgtgatgctaagttacctacaaattgctcagaggaaaatgattagagtcttaagatattaccattttgagaaataatttatatgtttagtagccttcagtgagtgacagaggaaaggccttgccctcttaactacactggaagagctgtttccattcctagagctacaatcaaagctatgcaatctgaaatggtccaactatgtgacacagtgagcaattaagatctctgtctataattaattatagatgccctttaaaaaaggccaaatcccccaaataaaaacaattcacaaaggcacctatttgtgttataggtgggtcaagaaatctattctttcaatttatctacctgtccaaatttgttgttaatggacacaaaagacaaactttctcaattcttttctatctccctttgagaatccattcttaacataactttatatataaattttgatcccttttgcttgttttttttttttgagataggggtcttgctatattgccaagggtggtattgaactcctgtgctaaagtgatcctcctgccttagcctcctgggtaggtgagattacaggtgcatgctaccgtgcctggctattgacgattttgatcttgccctatgattccctagaatgagaacataactataaactatatatctaccaaaaaagaaaggaagttttttgaaggttttcatatcccattcctcttccgagacaacaaaatattttagtctgaatggttacagaatattagaggattataaatctttgttatgcatttggtacattgttttcattaaaatttggctaattgttaattattagttaaaagttaaaactacagtcttctttcaggatttccccagccatgcaacaaataagtgtcctattttctgggaattaatgaatatgacacatagaagatgaatgataaatcccaaaccagaaaggcccaggttgaagaagaaaaaaagctaaaataacaaaatcagtgtggacagatttatctcataatacgctaaatcactgtatacttcaactcagctccatccacgtgtttgctgctgaaatgacaacatagtttactgatttcttagcacctcctttcttaaagctgtaattttgaaaacttatatagtttcttcagtgccttctagaaacaccatcttagtgatttctcattcaaatgtgatataaggaacacacacacaaactcaaatgtagagggtatatgggtaagtgaatcaaatgtgcattatgaaaggtagagaagaatgacctttataaaaatctcactggctacattgattcatttcttttaatgggtatagtataactggggctttttataaaacacatttttcaatattcagacaaaacattcaggttttcagtcattcacaaagagtgctctaaaaaatgaaaataaccagtgcatcagtgagacaaactccttcccacattagttggtgggaacataaattggtacaatctttctaggggccatttgaaaatgggtatagaaaaccttaacagtgtacatcttttaaaccaacaatttcgtgtctgagaatttattccaacaaaataatcaaggatatttagaaatagtcaatggtagtagtagcagcactagtagtaataacagcagctaacattcactgaattgttagtacttgtcaagcactgctctaggtaaacggggatgtgcactgtaatgagacctgtgagagtgaagaattggaaacgcctaaatgcctggtaatagtagactgattgaggaaatgcagattgaggaatcctatgaaggactaagtcagctattacaaatatgcaataaatgtgtagagagtaaagatataacaaaaaagtattacacaacagtgatgtaacaatttaaatttgcatttaatataaaataacatattttaaataatataaaattatattttttcatttttcaacatgaacttgtattgctataaattatccactataaaatcaataaaacagtttttgcaatctagatggttatttctttaaaaaaagagatctttctactcatttcacaaattccttacaatatcaaatacacgactgagtactgttgacccttaaacagcacagatttgaactacgtgggtccactcatacagatttttttttttcaccccaatgcagatagaaaatacaatattcacaggatgtgaaacctgtgtatacagcgggctgactgtatactaagaggaacaatatgcactaaacagattatctgtaattcttttttttttgagatggagtctcactctgtcccccaggctggagtgcagtggcacgatctcagctcactgcaagctccacctcccaggttcacgccattctcctgtctcagcctcctgagtagctgggactacaggagtccaccaccatgcccggctaattttttgtacttttttttagtagagacggggtttcaccatgttagccaggatggtctagaactcctgacctcgtgatccgcccgccttggcctcccaaagtgctgggattacaggcatgggccaccacacgtggccgattatctgtaattcttgatactgagtagttaatggtttagatgatgatagtggaagactatacatttttttatgcatcggaaagtaacacagtttgtatctctctaagaacgataaattttggaggttctggttttagttaatgatatggtttggctgtgtccccacccaaatctcatcttgaattgtagctcccataattcccacatgttgtgggagggacccaagtgggaggtaattgagtcataggggcagtttcccccatactgttctcatggtagtgaataagtctcatgagatctgatggttttataagagaaaatctgtttcacttggctctcatctctctctttgccggccaccatgttaagacatgcctttcaccttctgccatgattgtgaggcctcccaagtcatgtggaactgtgagtcaattaaacctctttcctttataaattacccagtcttgggtatgtctttattagcagcatgagaacagactaatacagtcaacattcttgactgaaccttctacaacttaccaataaatctctaattttttggagacagagtctcactctgtcatccaggctggagtgcagtggcacaatctcaggtcactgcaacttctgcctccaggttcaagcaattctcgttcttcagcctcctgagtagctgggattataggtgcacgctaccacagcaggttaatttttgtatttttagtagagatggggttttgccatagttggccaggctggttttgaactcctggcctcaagtgatctgcccacctcagcctcccaaagtgctgggattataggcatgagccattgcacctggcctaaatctctattatggcacagaaaaggtatgaaaatacacttaaagccaggttctcagatattaaaatctattatgctgtactataacaaaaacagcatggtactgccataggaattgactgtagaataaaatggtgagtcctgaaatacattcatgaatgtatggaagattaacactgaacaaaggtggaatttcaatttagtggaaaaaatagaaatgtttaaataaaattaaaacagctagttattcgcctgggacaaaatcatgtacaaaaataaattccagatctatacatttttttttgttaagatggagtctcactctgttgcccaggctggagtgtagtggcgcgatctcagctcactgcaagctccgcctcccgggttcacgccattctcctgtttc[134 bp omitted]ggccccccaaagtgctgggattacaggtgtgagccactgcgcccagcctcccagatccataattttttttttaagaaacccagatgctatgaagaaaaagacaaatttcattatattgagagtgaaaattttcacatcgaagagtttacgattaacagagtcaaatgacaactctaacaaaaataactgtaatacataatattaatgcatattatatacagatagctcccacaaattcataggaaaaggatgaacaacccaatataaaaatgggccaagaatatcaataagtcacaagagaggcaatccaaaaagccaataagcacacactcaagggtagtcatggaaattaaaaaatgtagaaataaggtattatttcttattgatcagaagggaaaaaattaaaaagcctggtaaaagccactgtggtcaaaaatttagagaaaagagttcacttgcattgtgggttgaaatatgatttcttaagattaaaaccatatatactcttcaacttaacaatctcactcctgggaattcagcgcatagaaatgaaggcaccagtatggaaggctacatgtataaagatgtctattaaagtttagggaagactaatgggggtccccataaaagagtttacatagcaggcctgagactactatgcttacagtggtctgtctgttggtccttggctggtgtctgggaacttgctggtcaacagctccctacgttgatacaaaactttccctaagtaataagattggtttactgtgtttaaactatgtttatacaaataatgtagattgtgctgaatatctgatttcccttctgagaatctggaattttggtacatgataggcagaaggtgcctaatgaccagttcctggtaaaaacttttgagtactgagtctctaaggagctcccctggtagacaacacttggcatgtgttgacacagctcattgctggaggaattgagtgcatctggtgccactctactgggagaagactcttggaagcctgctcctggtttcctctggatctcactccttgtgcattttccctttgctgattttgctttgatcctctcgctgtaataaattctactcatcagtacaacactatgctgagtcctgtgaatccttctagtgaatcatcaaaacaggatagtcttgaggactctcgacatagggggtgagaagaaatgtgggcagagaggaaaaatgtggggaaaaaagatagtacaaagtactgcagaaaaagataaagttgatcatagaaatacactcatatgaactatgatcttctttatattattttagatatgtttgtctatatgcacagaaagatatcaaaaaggatggccaccacaatgttaatgatgttacttctggatggtggggttttaggtgactttttcacattttcccttatattttttgtatgctttaaatttgttcttacaatgagcataatttatttatattatcagtatagctatttttattttaaaaggaaataaaaatcaattgttggagattcttgtttaaaataacagctcctgatactgtctctcctaacttcccattaaatttctataaggatacagaaaaagtaaaaacacacatcacatggttaggtgactgatgacccattccgaaaagcccagagaaatttcctccaattttatggcctgtggagttgatccaaaaaaacataatcagtaggtcgcacataagataccctggaatggtcttcttgagcatagggaaggagacccttatattccctactccactgcctcatggtgaagaaatgcgagatctgtctcacagagaagactggacagctttcccttcactgcatatgtgataatttttgaagccactgtcccttctcttttagaatctctttcctagacagagactaatttctcaccagaaaaaaagcagaggtagggactggtaatggcaccctgcatttctagaagcacagtgctgtcagagagaaccaggaaaggaagaagcctagtggctgcagccctagtagcacacctggaattacatctttttatatatgagctgggctcatctttggctagcagagctgccacagactgaagtctgtgggacactgacaattgtgaaggaagtaaacaaactatcgctgtagatttaaaaagaggaatctaccgggcaccatgtagaaagaaagtgagttccagggtagagtgattatgtagtttatccatactggaacactttgagagtaaaaggggtactattaatagtcacaacaggcaattgccataaaccaggactgtcctaagcaaactgagaggtatggtcaccctggttcagagtctaactctgagcttgaatcaatcaatctcttgaataggtagaaagaaaaaaagacatagtaacagatctgggggcagaggaatctaccaaaaaaaccctaaaaacaagcctacaggtaagtacttgagatccaagggtaaggactccaggacttgaagacagagaagaacagatacttgaaaataatttactatggcagaaaacagagatccaacagaaacatttacaagcattcttgagaaatagaactgaatgaaagcaacattaaaaaaaaattaatagaaggaaaatgttttgggatgaaacagaatttagtattccagtccaaatgttttcctgagctctaggcaaaataaataaaaagaaaccaacacttagaaacatcttggcaactggaagaaaaaattcattatttatacatgatataattatttacctaggaaagccaacagaatcaacaaatataaatcaagaaaggttttgttctagatttagataaagcaacataaatcaatattatttctctgtactaacactgccatgtaggaaacataataaaaaaattcaccccagcaacaaaaataataaagtatctaggaattaaccatgaattcatagggcctaagtctaaagttcaataaagatgatttaagtaaacctatattacactcttaataagatgatttaatattgtagaaatgttaatcatttcaaattaatctatattcagttcaatcctaataaaaattattgaatttaataaacttatgcacttaaaatgtatactgcagaataaaggtctatgtataggttaatcaaccttaataaagaagtagaaaagataaactaaccctctaacacactaatatatataataaaagctgtgttgcattagtgcaaaaacaggcaaatagaaaaatggaacagaatagagcacacagagacaggatgtgtgtgtaagtgtgaataaaactattccctatctacatacaggaacttaatatataataaaagtggcactgcaaatcaatgggaaaagggcagattgcttagtagatgatattgagaaaactttctcaccatatggagaaaaataaaactagtttcctatataaaaccatgtatgaaggtggattctaaatgaattaaagacctaaatgtgaaaggtaaaaccatacagttcatagaagaaaatacagaatatctttgtgactgagagacatgaaaagccttcttaaagaaaattccaaatcactaactataaggcaaaatattgaagactttgattatgtcaaaattaagaattcggtccacaaagcatcttatggataaagttcattagaatgcttacagaataggagaatatataacatctaaagtaaataagaggttaatgtttggaatattgaaggcatttctgctaatcaacaagaaagtaccagctcgagtagaaaaacaaagtatgaatagacagtttacaggaaaatacagcaagcaaagaagcatttaatgagataatcaaactcaaaggtaatcagagaaatacaaagtaaaacaacaatgagatatcattctatctattaatctgacaaaatttaggtagctggaagatactggtagggatatggcacatagtaaccctcatatacagctgttggcggtgcaaactggctcatgcaagataacctggcactatttatatcaattaggtatacacatgccctatgacccagcaacttttcacctaggtatatatcccaaggacatcctcacagaggtatatgatttttcatatagctctacaattttttgcattattttagttcatatggaagatatgggaaagggtatgggggatacaaagaaatacatgaattagtgaatgaaatgagaaggggccttgcacagatcaatgatgacaggtacagcaccatcaactaacgagcattgagtcagcactgaggtcaagtggtggtgagtaggtaatgataggtgaaggaggcaatttcaaacatgttg[142 bp omitted]aaaccctatctctactaaaaacacaaaaattagccaggtgtggtggtgtgcgcctgtaatcccagctactcgggaggctgaggcaggagaatcacttgaaccctggaggtggaggtggcagtaagccaagattgtgccactgcactccagcctaggtgacatagtgagactccgtctcgggggggaaaaaaaaagtcctttatgcatttaagctgaaggaaaaaacacagttaacagtaaaggacagaaagactggttcagacatctctccaactttaaaaacaaaatatcttcagagttttgaagataaaataattttgaacttgggcaaaaataattttgaactggggcaaccaagtaagttttccatgtgtgaaggcaacagaaaacattttaagatatgcatagacataaaacaacatatcttccaggaatatttcttgaattaaagaaaatatgcaacaaatttttaagaacttaaaagcaaaatcttatccttatatataaaatataaaattaccttttgtagaaagaggacaatccttatgagcatctgggcacggagttcttccaaggtaaacaatgttcggggtgttcgaatgaaaattttggtcttcccataagctacatcatcctgaaaaccacaccgttcaattagtttcttgacagcctctttgtctgaaggaaggtcatggttgggccaggtgaattcagagatcatcttatacctggatgaaaaaaagaaacagggttaagggagaaaaccatatggtcatctcaatagaaaactattcaataaaatgcaagacacctcatagaaaaccaaatcttagcaaactatcaatagaatttcattagcctcataaggtatgcaaaaaaggcttcagtaaaataaaacactttaagataacaactcttactaaactaggtatagaagggacttcctcaagctcatacagtctatttgccaaaatcctacggcaaatattgttcataaaggggtaaccttagaaacattctttttacaaacagatacaagagaagggtggctctgtcatgggtcctgctcggcattgctctggaggtctagtcgacatagtgagaccaagacataattggtaaatgactgacagaaaaacaaaatggatactacttatgtataatgtaactttcctcaaaggaaatcaagcagatctctagataaaaaaactattataactaaaagaaaattaagcagtgttgctgcacataagagcaacacacaaaaattaattgcatttctacatacgagcagtcaacagctccttgtcatgtgggcctctcattaaggcagctcaccacacagcggcttgcttcatgagtgtgagtgtgaacaagacagaagtcacagagtcacagtcttttgtggtctaatctcaaaagtgacatcctatcacttttgccatattctactttgtcagaagcaaatcactaggtctagcctacactcacaggaaggggattacacagggcatggataccaggaggtagagggcatcttagaaggctatcacagagctttttccatcatgcaaagttgtttaacacatgtagtcaaatttagtttttttcttatattacatctaaattttaagtcattgtatgaaaagctttcttcacttgggttatagagtaatgcatttatgttttcttctagtacttgtatgttttcatttttcacatttagatttctgatcatttagagggtttttttggtatatggtgtgaggtatggatctaattttatcttttaacaaatggctgtctagctgttccaacactattaaaaagtccatctttcccctctgtgattaacatgctgcctttatcatatgtgcttcagtttatttctggactttctggtctgtttcattgctgtgtctgtccatctgtgcatcactaccacatggttttaattatagaggatacaagtacattttaatgtttttcctaattcttttcttttttaaaggtctttctagttattctggcacacatatttttccaaatgaacttcagaatcaagttttacagttccaggcaaaaaaaccagaattcagtgaataaacaatttttaaagacccaaagcacccttgatagatttagtgagttggaacattaaatacattattattattattattttgacacagagtctcgctctatctatgagtgcagtggtgcgatctcagctcactgcaacccccgcctcccggtccaagtgattctcctgcctcagcctcctgagcagttgggattacaggcaactaccaagcccagctaatttttttgttaacagtagagatggggttttaccatgttggccaggctggtcttgaactcctgacctcaagtgatctgcccgccttggcctctcaaaatgctgggattataggcaagagccactgcactcagtgaatccattaatttttatatggtgttgagttgtcctattcaagaacaagagatgttttcccacttgatctagtctgctttgtgccttacatgaatctttaaagttttctcatatgtcttttctttcttttttttttttaataattattttatttttaagttctgaggtacatgtgtaggatgtgcaggtttgttacataggcaaatgtgtgccatggtggtttgctgtacaaatcagcccattacctaggtattaagcccagcatccattagctattcttcctgatgatctccattctcccacccccaccccaacaggccccagtgtgtgttattcaccccgatatgtccacgtgttctcattgttcagctcccacttataagtgagaacatgtgcggtttggttttctgttcctctgttagtctgctgaggatagtggcttccagctccatccatgtccctgcaaagggcattacctctttcctttttatggctgcatagtattccatggtgtgtatgtaccacattttctttatctagtctatcatttcattgatgggcatttgggttgattccatgtctttgctattgtgaatagtgctgcaatgaacatacctgtgcatgtatccacaaaaacaagcaatggggaaaggattccctatttaataaatgatgctgggagaactggctagccatatgcagaaaattgaaattggatccctttcttataccttatacaaaaactaactcaaggtggattaaagacttaaatgtaaaacccaaaaccataaaaaccccacaagaaaatctaggcaataccattcaggatacaggcatgggcaaagacttcatgatgaaatcaccaaaagtaattgcaaaaaaagcaaaaatgacaaattaaactaaagagcttctacacaacaaacgaaattatcatcagagtgaacagacaacttacagaatgggagagaatttttgcaatctatccatctgataaaggactaatatccagaatctaaaaggaaattaagcaaatgtacaagaaaaaaaaaatcaaacaaccccattaaaaagtgggcaaaggatataaacagacacttctcaaaaaaagacatacatgcggccaacatatgaaaaatagctcaacatcactgatcattagagaaatgcaaatcaaaaccacaatgagataacatctcacgtcagtcagaatggcaattagtaaaaagtcaagaaacaacaaatgctggcaaggttgcagagaaacaggaacacttttatactattggtgggaatgtaaattagttcaaccattgtggaagacagtgtggtgattcctcaaagattttgaacccgaaatgccatttgacccagcaatccccttactgggtatatacccaaaggaatataaatcattcacagggcttttcatatttcttgttaagatagtagatatgtaggaagcatctgttaattactccctaattacagttaattacttccttcttcttgacatatctcttttcttagattccatgacagcatgctctccttctgcctccctggatatatcttgtcaatctgattttctggctactctggctactactatacccccaaatgcaggcgtgtcccaagcctaagacctggacttctttctatgtattctctccccacattacctcatctagtccacttacttttaataaaacattccaaatataaaaacaaaaatatgtatattttataagtatataaaatataaacatatattttcaatttgtgtgttatccctagtctagccctcagttatgagcttcagatttatatatccaatgtctatacaggtcttgaaggcatcttaattactccttcagtctttcctacctcaatctacccagttactaaagccaggatcctgagaatatttttattctttccctgccctatcatgatttctaatccatcatcaagttctattgactctacctccaaaatatatttaacaattctcctcatctttattgcttcaattcaaaggcaagccaccttctagtttacaacagactcctaaattattttccatttcctttccaatccattctgcatacatcagtcagagtagttttctaaaaagcttgaaatcatttttgtctttggctgctttccttcctcactatccatcaatcatgttaacttctttggggttctgtaatgcggttgcctccttcctacttcagggtctttgcacatgctgttcccactgcccggaatgcattttatctagtccttgaaagtctggctccttctcatcctttagtcttttcttgatctttgtatatcaacaaaccctctacccccaatattctctctaaggcaactagttttatttattcttttctcacatgatttatcacaacttgtaatcatactgatttgtgggtttatctgcttaatgtcagtctccctccctagtctgtggctaatatgaaggcagggactttgttttgttccccactatataccatgtgcctatcatgttgcctgccatactatgaggcaatagatatttgcagaatgaatgaaaagaaatcatttaaagcctactcacttgctagatgggggcagagatcaaagccaaatgaaaaagttttaatataaagacagaggtaataccaaacaatgtcacatgaaaaaaagtgaaatcagaaacctctcaaatttgttacaccaaactatagtaggggtctacatctgggtcatcatatgggtagtgctggtgttgtttgtttcaggcacgcttcagaaactggattgctatcctacagccccactgctcagctcccatggcaggcaagaggcactctgccttctttcatgccagcaaactgcatgaccctggttctctggcaaaccagcaatctgaacttgctaattaaaaagttgaactcatctgctttctgacaaggagttttacctccctaaaggactttagtagcttttaaggttatcagcatgttttaaatccttctctcttttctcagtaaaataaatgaaaatgaagaaaagtcacaagcaaaaattcaggttcaaacctaaactacttgcaaaaaatctgcagaatctaaaagcaaaaattcactgtagaaaatattatcttttctctcatcatcactggatgagccacataaaaggggaataatgtatactcctcaagtggttgtcagttccagtgacttcctatatgtgaaatgtttaaatcagtatctagtacatccagtaaacatttcaaaatattcacaactattattataactcacttgaaaatttcaacacataattcttttcctgtctagttaatcacggtctataatatcctttccataaataggacaaaatctttaattatctctacttctcactcccattttaatttttgttccagattatcactaaagacttcttccccacccttacaatcagtacttgtttagatttaacaaaaagttttacagatttctttgctcaatgttgcttttttgcatatatcctgccacatgtttcctttctgcattcatctttctttttgctgaagtatatcctctagaagatttttcagagggtctatgagtaataaactttctcaaactaggtatgccagaaaatgctgtttattttactcacactcttgaatggtattttgacacagaatacaattctaggcatgaaagccctttccttacactgtgaaggcattttgctccttcgtctacttgatcaaacgttcatgaggaaccagatgtcagcgtgattctcactccccaaaggcagtttgtctttttttcttgggagctataattatttttctttaacattctaaaagtgaacaaatgtatttttaagtttttaaaaaattcttatgcttgacaatcagtgtatccttttaatctgaagattcgtcttttttcagttcatgcaaatccctggccactgttcgaatagtgcctctcccctattcttggtgttctttcctctagtccttctgttacatgggttttgctgctcctggatcaaccttacatgcggctagacctttgtttaatacttcccatctttttttctttgtgatgagatctggaacaagacttcagcttgatcctctggcccactaatttactttttaaaaaagtttagtttttaaaaaacattttaaaaattgtgatcaaatttacatacactaaaatatacacatttaagtatataattcaagtatataattcaagttctgacaaacgtgtatactcatgaaaccgacaccctgatcaagatatatcatctcagagagttcccccattctgctttctagtctgccatacaaatagctaaccactattctgatttctatcaccataaattagttttgcctgctcttgaacttcatataaagggcagcataaagttgctacacttttcttcttaaaatgccatcttctggctgggcgtggtggctcatgcctataatcccagcactttgggaggctgaggcgggtggatcacctggggtcaggaggttgagaccagcctggccaacatggtgaaactctgtctctattaaaaatgaaaaaaaaattagctgggtgtggtgacgcgcccctgtaatcccagctatttgggaggctggggtgggagaatcgcttgaacccgggaggtggagctgcagtgagctgagatggcgccactgtactccagcttgggtgacagagcaagaccctgtcaaaaaaagaaaaaaaaagccatcttctcttggcttctgtaacataatcctcttctggtttttcttctaccttattggttgctgcttctcttatctttgctggttctttcatgccagaccacaaatctaaacattgtcatggacctcctcctcttcactatccagtcccgagactttctatgtaatctatgttaccagtgactccaaaatctcttatttgcagcctaaacttctttccagaactccaggtatgaaagtctaatggcttaatatttctgcctagatacttagtaggcatttcaaagtgaacatagagatgtgtcaaagttaacatagtcaagagaataatcttgattccatctttactcctgttccacatcctgttcctcaaaattattttacccaattttatctcagcaaatggtactgtgcttacctagatgctcaagccaaaatataattttcatccttcattcctctttattcctatttcatcatatccaatccatgagagagtcttgtcaactttatccctcaaacatatcccaaatctgtccactgctctcatatctataatagtcccttactgaaggcactgtcatcaagccctgtttcctggactcctgcaatagcatccttaaacatctccttgcccttttttttttttttttgagacggagtctcgctctgtcacccaggctggagtgcagtggcatgatcttggctcactgcaagctccgcctcccaggttcaggccattctcctgcctcagcctccccgagtagctgggactacaggcgcccgccaccacgcccggctaattttttgtatttttagtagagatggggtttcaccttgttagccaggatggtctagatctcctgacctcatgatctgcccccctcagcctcccaaagtgctgggattacagatgtgagccactgcgcctggccaacatctccttgccttctattcacacagtagccacagtgattcctttaagacatccataaggttatgtaattccatgcttaaaatccaccaatggttttgtttctttgttttttaaatcacgcctagccaaaatctaaatagtttagtctgattacaaagtttgacatgatttggctcttgtccatctctctgatctcatctcacaccactgtcctgtcagtgtcctccaaccacaatggactacatttggcatctaaaatgcctcacttactaccacaatagagccttttccctggctgttccctctgccccatcttctctttgctctgatctttgtatggctggctgcttcctgtcattgtcagctccttagagactcttttttgaccaactaatctaaagtattttaattttctgcatttttcttatttatattttatgtaaatttatatttattcatttttggggggaaaactatagtcgagattatagaaaatgttcaataagtgttttaaaacagatggaatttaaagcattcttgtgattccaagttatcaattatcattatcatttttttatatgacatggtatcattaagcaacattatcaacaataaattaacaatagcaacaatatattacacttattgagtgattactttacggaggtactactattccaagtgttttgtatatattatcttatttaaccctctagcaatgcttcaaggtagttattattattatccccattttacacatgaggaaacaggcatgaaaagggtatgtaatttgtccaaagtcacacaactgaaaaatgacagagccaggaatcaaaccaggcagactgatttcaggtcctccatgcttaactccttaatattttattattatgataattactgacaccagtaatgataggcagtgttaattaaatagctatgatgtaccaggaatctaggctttttacttaggttaatttctcataacagtcctatgaaatgttattttacttatttcacagatgcaaaaacagggtcatagaagttaaatttctggcccatgatcaagcagcaagtaagtggcataatcagaattccacccacaatgtgatttcagatcagtgctctttctgctatgctatgatgccagtatttcctcccaaaaggctgaaactttttcatggtccataaaccatgaattcagggactcatgttgaaactgggaaagtctttcatatttgtaatttcctcagctcttttgttcacccaacaaatatttatagattgcctaatatgtgctgatgcactattgtacggggaggactcccttattctcagtgaactaggcctctctgacgagtctattctcacctgtgaagaaacttctcgtatgtctggcggaaggcaaatcctgcccgacgcactctcacattttccagtagtccaagatattctacttggtgccggcagcgttcatcatcaaatatctgtggagatttcttgtcattgggtttgatgcaacgaacgtaatatggttcctaaagaaataaatcagcaaatggtaagtttcactggagaaaatttcccagctagggacactaacatgtaattagtgttaattgtgtcaagttaagctcagtgcctctaatttctcaggcatacacttgtgaataaagtagttattcttcctttctccttcaattcaaggttagaagttctcatgcattcagccaaatttttgtttaattatgttttagggtttattaggaatagtagaaaagggataaaactaggaagtaaataacagagacgtaaagatcgagtttctgtgtatttatgaaaacaaggttaaagcagctgaaggagtaattcaatagaaaaaggcagcagctaacgatgaaaatggatggagaatgtaaaaggacattctttgttaatgttaatattatgttaaggaatgatagggacggacagctctggtatatagtaagtgctccttaagtgtcagccatcattattaatattattgcattagtttgcactttcggaaaagagattaaacttcacgggtaagtagagaaattccaaaaccacctacaggcatcactgattctatgaaggagctcagctagcaatccttccctctgtgccaattaagttttatactacatattagatcataaccccttttaaatataaaaccatgcttggcatagatcctggtacactgaagataatgaataaattatcactggatgaatcaatgaggtcaaatgtatcctacaagtgtaaagaatttctttttcttctctgaatctgttatctatcagacacacacagatgcactttgattaagatacagaatactctgtagttaaattaggcagttttgagctctgctgagggctagaagtagaaacgggtagtaaataatttaagaagtaggagagatttgaaggatgtaaatttacttgcattttgaacagaataacagttttcaacacctaaaaaaagaaactccgatagtacatttatcatgctgtcctacatggtgaaaggtaatgccattttttgcctttttctaggccctgctgtattagtttcctattgctgctatagcagattatcataaatctagtatattaaaacaacacagttttattatctcacatttctggaggtcagaagtctgaaataggtttaactgagtcaaaagtcaatgtgtcagcagggttggtgtttttgggagctccagaagaaaacccattttctcttattttccagcttctggaggctgcccacattccttggctggtggcccccttccatcttcaaagccagcaatggccagttgagtcttttatgatgtcacctcttcgttctgacttttctgcttccctccttcccactgaaggactcgtgatagcactgggctcacttgggtaatggaggataagcccttattttcaagcccatttattagtagccttatctccatctgcaaccttaattccaccttgccacagcacatatcatgttcataggttctggggattaggatgtggacatctgggatgactatggtatagtaatagtaagaataaaaaatattatctaccagcctttgttcctggtttctggcatagcgcttcaaaaacttatgaaatttcttcagtgacaggagtgtcttagttatgataatgaggtgactcatagctgggcatctagatagcttcaggatgggagctggtcaccagaaaactccgtcatgtgctggaacttacagctgcctgacctctgggcaggttagggggactaaagattaagcttaatcatgtgaccaaagatttagtcaatcatgcctttgtgatgaaacgctgataaaacaaaaaaaacaaaacctcaggacgctgagcctcacaacggcgtcttggttggtgaacacatggatgtactcagagggtggtgcaccctgattccagggggacagaagctcctgcgcttggacccgagttctgtgaatcattctagtgaattatcaaacctgaagaggggggtcatgggaatcctcaaatttatacccaagttatatataagggcaggtgttctgtggacctcacttgcagctggtgtctgaagtaaaggagagtcttattagggaccctgtcctttaattttttagattaatgctaactctgggtagttagtgtaagaactgaattgaattgtaggacacttagctgatgttagagagttgctgttgctatgcagaggccactattctgcctagtacacctgccctttttcatcttgtcatctgtagcagaaggaaaaacatgacctcaatatcttgcaccacctcccagtaagaggtggagtctctacaccacttctcgaatctggcttggcctgtgacatgctttaaccagtagaatgcagcagaagcaacactgggttacttctggaagtccatcctcgagagggtctgcctgccctcttggaccacttctaccatgtgaagaagcccgggattaaagactacatgaagaaaagatgctcagtcatccaggcacgccatttgagtgagctcatcttagcctatctcgccccagctgactgcagctgcttggtgagcccagcagaactgcccagtcaacccctgaatcatgacaaagaaccattattttaagcactatattttacagtgatttgttatggattgatagataacttacacttcttccctattctggaataccaaccctttcattagatattaaattttggtatattttattataaagcacaagcagaatcctactttaaaaatagtgatgtgtgatcaaacgttcactaaatctgtaatgattttcaagtggagcatctatattgggggaacaactgtagctcactttaaaaaatggcttatagtaagttttttaaaaaacttaataggatggggaagtcgggcggaggcactgtttacttaaggattttctactagtttgctggaatagaatgcctttactttttggtgaataaaccaagaaaagtggcactgagcacagtaaatgccaaaatgctaccagatttatctgcatgtttggcaccagtgtaacagaataagcattgtacaaaatcagaacacttgagtcttggctgtaaattctctctggaactaattagctaatttatgaaatgaagatacgggggctttctttgagtaatgacagactaggtaatttaaactgacacccgtgctgagggttaactagaataggtaaacaaaataaacaaaacgtttgccagaagacatgggagatctaacaacacagtggagaatttactgggtcagaatccaggagaggaagaaaaccgtggaggagaacccaggtttgaggctgcctttttttcctggggaaatttgccagttccagagaaggtagatgggatctgagtagtgattctggcagcttcatgggcctagtgggacaaagattagcgagcaaggcctgaaaaggaggggacacaggtaaacccctctcactttgggttaggatcccaccaacaggaataaggatgaagtagaaggaggcagtcctttacagagcccataattcagctttgaatcacctaagtccttgaaattggaatagctgatttggaatactattgttcttaggtaactaaaagaagcaaaattaactcttccctgaagaaaaatcacataaacttgggcctccaattatttctgcagataattttgcaaatataatatttggaacaaaataaaaagtaaccagacatgtaagtagccaagtaaactggaattagaaacagcaaaacaaaataaaaaaataaacgaacctgcaggtatccagacactggagttatcagatagagatattaaaataactatgcttaccatgttcaaggtgacaaaagacaataatgagaattttgtatagaaccagaaactatgaaaaagaaccaagccaaatggaaacctagaactgaaaaatataataaaggaaattaagaactcagtggatcagtacaagagtagattagaagtaggtgaagaaggccaggtgtggtggctcatgcctgtaatcccagccctttaggaggccaaggtgggtggatcacttgaggtcaggagtttgagaccagcctggccaacatggtgaaaccccgtttctactaaaaatacaaaaaattagctgggcatggtggcacgctcctgtaatcccagtttactcaggaggctgaggcaggagaatgtcttgaacctgggaggcagagtttgcagtgagctgagatcgcgccactgcactccagcctgggcaacagagcgagactccatcttaaagaaaaaaaaaagaaataggtgaagaaaaaaaaaatgaatgtactagaagttaggtgagaagaaattttctggaatgaagcatggatagataaaaagatggaaaataaagatgggaggctaagaggtatagaagacacagtgagatggagttctaaaggagaggagacagaagggacagaagaaatatttgaaaagaacttgctaaaactgattaaaaaaaaggggagctacaaatggaagagattctacaaactacaagcatatttaaaaaaaaatctacacctaagcacatcatagtgaaacttctgaaaatcaaagcagccagagggaaaaaaaagattaccttaaggagcaacaaagagacagactgacagctaacttctcaaaagaaactatgaaatccagaagacaaaggaacactatctttgaagtgccaaaagacactgctaacgtagaattttacactgagcaaaaatattcttcaagaatgaaaacagtatagaaatattttttggtaaacaaaaacaacatttgtcaccctcagatttcaaatataatagagtgaggttaaggc[137 bp omitted]atggtgaaaccccatctctaccaaaaaatacaaaaattaactgggtgtggtggcgtgcacctgtagtcccagctacttgggaggctgaggcacaggaattgcttgaacccaggaggtggaggttgcagtgagctgagatcatgccaatgcactccagtctgggtgacagagtgagaccctgtctcaaaaaaaaaagaaaagaaaaagaaaaaaagtcatgcttttcatgagtaacttggcaaaataaaaccatgatatattttaaaaaaataggaagagaaaaaagataaacaagtgaataaatagatataatagatgtaaattacaatctaaatagatatatattatatctatatcatctaatagctataacagatataatagatatagatattagataatatagatcatataggtataaatagctataggtaatatagatacagataatatagatataacatctatatctaatataataaatatatttatatctaaatagatataataatgtcttactggctttaaaaatgtatatgcatgttattttggtatataattaaaatacatgaccaaatatattttggtatataattaaaatacatgcatgttattttggtatataattaaaatacatgaccaaaatagcatacaagttaggaggaaggtaaatggaattaaattggccttgtatttcctaggaaggaggcaaaagtaccaaataacattagatttttatattcaagaatgatattgcaataagtcaagtaaccactataacagtatttaagtaaatcttccaaaataataaagagaataaataaaatgataaaaaatacttgcaacaccagtggaggggaaagagtatgatcttaggtctaactaaacattttgactcagaatactcataggccacatttggcaccaatctcttcaaaaggccaagaacacggtttgctagcaggtagcgtcagtgtccttggagcagtccacacagcagtcaagtgacagcttaggtgtaaggagatgagatccacattggacatgtgtgcgaggtgaacttggcttaaaagcctcatgccccacaggaccaaatatctcttagaacagctcagaagacatagcttcaagggtccagcaaaggacagacctaatacaggagtcactaagctcaggcaaacccaaagtatataaaacccaccagacatcattctcccaagacagatgcaatttactgacagggataattctgaccataagtaatgttgttaagtgatacatgtcttactaggttgccagaggaacagagctagaaatttaactgaggttaagctgtcaaggggaaggaataaagttttgtttacctttctcccacaataatcaatctaaaagaaatacagaaaaaaagaaaataaatacagaagagtcaaatagaagcattaacaagatgcctgatttaaatgcaacacacactatattaaaagtaaatgaactaaatgatttattcaaaagacaaaaattgtcagactggattaaaaaaatcaaagctaactatatgctacttatgagagacacacttgaaacataaggatatagaaagattgaaagtaaaaggatgaaaaagatataccatgcaaactctagccaaaagaaaagctggcatagctatattattcatgcaaagcagatttcaaggcaaaaagcaatatggaaatagagatgtttcataatgataaatgactcaaacaccaggaagatataacagttctaacttgaatgagcctaacaaattctctaaatatttacacaaaaaatcaaaggtacaataaggacaagcagataaattcagaatcaaggcagagtttaaaacacctttcaatgtttacaaaacaaagaagtcaggaagaaaatagaaaagttgaacaatattattagcaaacttgacctaatggacttgtatagaatattgaatgcaatttttttttttttttgagacagtctcacaccgtcacccaggctggagtgcaatggcgtgatctcagctcattgcaacctcggactcccgggttcacgtgattctcctgcctcagcctcccgaacagctgggattacagggtgcacaccaccatgcctggctaattttttgtacttttagtagagacagggtttcactatgttggccaggctggtcttgaactcctgatcttgtgatctgcccaccttggactcccaaagtgctgggattacaggcatgagccaccgcgcccggctgcaaattattttttaaagacaaacaaaacatatacataaagcaaatttagcaaatttctaaaaattgaaaccacacagagtatgtcttttgatgaaataagactaagctagaaatcaagagcaaaaagataatgagaaaatcctatatgttgaaaattaagaaaaatacttctgaacaactaaaccttaggtcaaaaaggaaattacaatgtgatttggaaaatattttggactgaataatgtataaaatcatgtaggcaacgcaatcttataaggcatcatatgaagagtattaatacaactttattaaccagaaaatagttgaatggactattaccagtactgagtgattacgcataggaagtggcaatattggatgagacactaacaaccaactaagaaatggggggaagccctttcatcctgtttagtgatataaaagtctttggataaggaatatagtgggaatactttctctatatttaatcagcattctgtctcaatttataaatgctgcctcctctctcatttataaatatccagactgactcagcctaagaaatcctaaatttggcaaattcagagtgtcttataaaggttaaattgcaaaagttaatagtgatcttattctcttgaactttttcacctgtctctccctatatattttacgggaaaaaaaacaccatttgtgaaagtacaccaatcagtatatagattagctagactacactatctaaatatacctctatttaacttgctttgaacactgtcaaatagtcatagcaaattcaagttcatttaataatttactgacaatctgttttagtaccttattaggtattaatacataaaattaacaaaacccattctctagattcaaaagatttataatctgggtggggatacaagtcatgaactgaaggcactatggactctgtgaaagtgaggagccagggacgtctacttctggtaatggagcactaggtaatacttatcaatcttcctgatgaagttactaaaaaaaagtgctagacaaaatatggggaaaaggttttggtaagtgcatctcggagctaataagatagtgaggaaagacctggccaaaatcagaaaactaaaatcaagttgagtgagcctacacctcatggttgtttttgtcttagaagctactgttgatatggaaaagacagtcataaggctgaacatagcttctggctttcatgggacttgggtaccaaagttagaacctggggtcttggatgagggactgtagtttggtctggaatcctgaatagctaaaccagggagataaaggtgaatggacgacagcccaacactgagctactacaggccctgaaatgggataaaggtgatcccagactgtcgaactgatataaactttcagttgttctatttccttacgggtgtcactaataaatagcatatatctggattctttttcttcagtctgaattggtttttatccatttacattcaatgtaattactaatatatttatatttgtttctaccaaatatccagctttcccatgttcttttgtttcttcttttttatgtttttgttttgggggcagggaggattctttgtttttattgtttttttttttcttttccttctctactagtttggaatttataacctctattttctactattttcaatgattatgttagaaaattttcacatgtatttttaactcatcagagttgaacgttaaacaatatttttattatttttttctgaactaaggaccttaaacactggaattacaattacctgctcttctaattgatatgcaattgttactgtgataactctaatctgtattttccattccacaaaatattattttacagagttcatttacatgcatctacgtatttaccaattctttgctcttcttttcttttcgcatttcagagtttcacttagtatactcttcctattgtctgatgaatatcttttagaatctccttaagtgaggttgataaactctctgtttttggtttttgtttttcagaaagattctttattgtgcctttgttctggaaaaaatgtattccctgggtatagaatttggtttacgtttattttctctcagcctaattgtcatacttttgaatctaatctgtcttttctctggctgcttttaagatattttctttgtctttaatgttctaggattttactaggtgtctatatgcagatttcttttaatttttctaacttcagattcattgggcttcctgattctgttaagtccttcaatattcttgaaattctcaggaatatttcttcaaatattgttctatccattttctcttctataactctgataagatacatgtttgaccactttattttctcttccacgtgtcttttttttttttttttttttcagagacagtcttgctctgtcgcccaggcgggagtgcagtggcacaattttggctcactgcaacctctgcctcccgggttcaagcgattctccttcctcagccttctgagtagctgggattacatgtgcatgccaccacacctggctaatttttttgtatttttagtagagacagggt[134 bp omitted]tcttagtctaagtggaattctggataatccttcagttcttattttcatttcactactttctcttcagctttatgtaaactgatgttaaacctatccattgaatttttaattttaattacttagtttttatttctatcaattgtctagttgcttgttctctctcattttctggcctttcatttcttgatgtatattaagcattctcatattctctttctgatcatttctgtatcagaagttttcatgagtctgaacctgctgtttgttgtttagtttgccttttacttatagtatcttgtagtgattctttactgtgagctaattttccttagagctttgtggaaattctttaaggtctggtattggtggcccatctggagcagctgctgccatgatgctggctgcagtgggggaggtgcatctggggttgtgtgctccgtggagctggcagtagccaggaacaggtggaagccccgcccccttccaagttggctgggtgggatcatcgcacttcctgggtgcagctgtggccgcccagctacggtgcaggacccaggcatccctgtgctcttgggggctgggagcaggcaggagccccaacctcctgggtgaagccataaccacccagccatggctgtagacctgggtacctctgcactcccggggacatgggaagctcccctgcccctgttggcttggatgtgctgctcccaacgtctggcctctccctggtcttggcgcccactctgatttcagagcaaagttgaggctgagcctgggcactgttgcaacccagctgggtatgcgcacacttggggcagtgctgatatgccagccccctgctaccttggcccccttcagactttggatgccaaagagcacagcggaaggccaacggggtgctgagggcagcttggtgtgggcctggaggcaccccttggcacgaacagtctggactctgtgggtgctgtggatggcaggttaatggtggcaggaggcagacaggtgcctgggcagaaaggggtgggtcgctggtgaaatcccacctttgggccaggctgccagttccatggtccagagtgagaacttatagtgctttttccaggcctgcctatggaccaatcagcgcacacttcccctcctctgaagcccataaaaaccccagactcagccagactcaggcagacaatgggataacctgcctgtggagaggagctacccaccatgggtctcctctctgctgagagctgagcagatgatgggacgacctgcctgcagagaggagctagcttcatactgctggtctcctctatgctgagagatgagtagacaatgggaggacctgactgcagagaggagctacccactgagattctcctctgagctgttctgtcacccaataaagcacctctttgccttgctcaccctctatttgtatgcatacctcattcttcctggacacaggacaacaactcagaatccactgaatggcagggctaaaagagctgtaacacaaacagggctgaaacatgccctttgcttgccacgttgtgggtgacgaggagtgaagagagaaggagaagagctgtggcccttcagggagcccagacctaggagctccccaagccagggctgatatactctttggggctctgcagttcctggtatttccaagcttctgggcaccactgcattccccagtgccagccatggaagctgcttgcagtatgcctggtccagccgcagcctcacagggaaccagtgtctgtgccggcacctggagctgcccgctctgctgcagcctgtgtgcttggctgtgtgcagtggctggaccttatgctcgctcattcacactccccttgccattctgtgcctggctcacccttggcaagtgtggaatccaggctggtagggcaagctgagtgcagcctgcgaggctgagtaggtggaacaagcctggcaggcttgagcaaaactcaggcaaaggcaccaccaggcacaaaggtttctggcgagaaaagtcacaccccaaggattctgtgacagtatgaagatagtttcctaaggaaaacagttttacttgcttttttcagatgcctggggcaattataagacctggaccacctttaatcaaattgtcagtttgaggctttttcaagctacccagatagtatgagtttgggttgcaaaccacctaaaagctcacttatgattataaattcccaagagagattcacaccccctccacccatggctgagtgccaaggaccaagacaggcagttttccttactgataatggggaattacttctagttcactctacatgtagccctttaaagactcaccattgtgtgtgtgtgtgtgcacagaattccttattagataccctactttgggcaggccctgggcttcacttcaaggacccagccttgaataactatattcaaagttacacacttcaacaaatccccacagggtgaggggcagctttaggggttttttccttcactcagttaacttctgtattcactcagctcctggcttgtatatttcttacttttcgttagttcatggctagattcaagatgttgatttttatattttatctaacattttagttgttttcagttggctttagtgggcacctcattcaccatgttgccagaaaatgcattattcatatatttttgaggtctttacatctgtgtttctaagttaaattgatctctaattttattttctcatattaagcttgtattaaggtaatattaatctcattaaatgagttgagtagttgcctctcttcttcccaccctccaaaacagtttccatatgatagggattaatggctccacaaaggttttataaaactgatttgtaaaaccatctagatctgatgtccttggcaacgttgggaaaaggtggatttatcatcagttattcggattctttaaggttactgatatattcaggttgccccattcttcttgaattaattttgataactttttttttctagaaaaccatctacattttcaaattcattggcatatagttatccataatattctgatactttaaaaaaatctccataatgtctgcacagtaatagccctttttttgttcataattttttaatttatcagctttattagaggtcttattgattacttttttgttccattactttaaagttttactattttaaaaaatattttcttacttctttcttcaggttttctttggagttccttttctggcttcttaagttgtgcttagctcattaacttttcagtctttcttgttattttacaaaggcaacaaatggatcactttagcagtattctataaattctgacaaattttttgtcatgcacttcctaacattttataatttccattgtgatttcttcttcaaactatgacctgtttaggagagtacttttaaagttccaaaacatattacatttttttaatgctgatttttattttacttgctttgaagatgaaaactgtatctgtatatgcacttcttcaaaatagttgagatggctgagcatggtggctcacatctgcaatgccagcgctttaggaggccgaggtgggtggatgacctgagatcaggagttcaagaccaacctggtcaacatggtgaaaccccatctgtactaaaaatacaaaaaaaaaaaaatttagctgggtgtggtggcacacacctgtaatcccagctactcaggaggctgaggtgtgagaattgcttgaacccaggaggcagagaggttgcagtgagctgagatcgcaccatggcactccaacctgggcaacaaagcaagattccatctgaacacacacacacacacacacacacacacacacacacacacacgaacccaaaatggtttcctttgtcatctattatgtggtcaattcttgtaaatgttccatgtatactttattttattatttttttgagatggagtctcgctctgttgcccaggctggaatgcattggcaccatcttgctcactgctatctccacctcctgggttcaagtgattctcctgcctcagcctcccaagtagctgggacaacaggccaccatgcccagctaagttttgtatttttattagagacagggtttcactatgctggacaggctggtcttgaactcttgacctcaagtgatcctcctgccttggcctcccaaagtgctgggattacaggtataagccgccatgtctggccttgatgtatactttaaaggcatatgtatttcctattctctgggtacagggttcctttgatctattagataaagtttaaatttggttttcaaagcttctgcattctcactaacatttttgtctgcttcatctatcatttatctttctgacagcactggtttaaaatctcccactatgatggtggacttgtcaatttttcctttaaaatttttcaggttttttttttctttatagaatttacaagaagtatgggtatgttgttaggtaccatgttagttcaacatggcttgtcttggataattttgatatcactagtttatctgtattaatacttgctttcttaaattctatgttctttcacatgaatgttgcttttaaccgtttttggtgagaggtggcttgatatctttctacgtctttgtttttgagctttctgcatagtgttatttatgtgtgtctcctctaaggagcatatagctggattttccacctatctagtctgcttagtctatttacattatgatgaataccaattatttagatttatttctatcatattattttgttctaaatgcaactctttttttttttttctgctgtcctctagaacctctcagtctggctttaccttcttgccttctattgtactgataagttgtctatattcttctgcttatctctgctccctcccttctcccctgatctccatacacacatggattgggaagctgtagcagagattgctaggctagttccctactttatgtccagtatctttttcttactttaaaacagaattcttattgctagctgagtgcactgctgaccagaatgaaaatgtccttcccagcttccctgacaactctatatagcaaatggggtgtagctaaagtgtgtcaaacttccaggaagtctctttaaaaaggaggaagttccagctgccatcatggaccaggaggttgggtgccaagcactaggatggtagagcggaaggacagaaagaacttgggtctctaataactttggagctgccatgccagtcctgggatgccttcttctatacttcatttataggagagagtaataaatgtctctcttatttaagctactaattcagggatctgtttcattagaaggtgaatgcaattcctgatacagaaattatagaaggttctggaatttttatttctttacatggcacattaactaccaagtttagaaaacaaaacaattctttttctagttaattgactaactgtagttaactgaatatttaaaagtctttcatgaaattcagtgttcaactgtttcttgtgtcctgtgtcttccttccaggttcacttttcttcttgctggatgaagcaggctgcagttgacatgcaaagaaaagctgagatacaagagtgaagagtcctaacggcattccagcctccagtgccagtgtccttacccctgcctttctggaggtttgattatataagccaacaaattgtgcttatatgcggtcacttgaggccaaagaatcctgacaaaaggagatagaaagcgaccgcacagatgtgttcctgtggcatttgcctaatttatctatagtgaagtaaccagaaacagtatggattcaaattcttagagaggaagttgattttttaaaaaaagataacgaagaagaaactacataggagaagcaccagaagagaaagataaaaatgaagaaactaaaaataacatggctcagaatgctgcctaatttatcaaacttgccaacagcagcagttaggggtagaaatatgttctttaagggaaaaaacagacaaaagttatcaaatagtattagtccttaaagaaacaataaaaaacacaaataattgtcaataatacaacttttttttttttttttgagacaaggtcctgctctatcacccagactggagtgtagtggtgtgatcttggctcactgcaacctctgcctcccaggctcaagcgatcctcccaccttagcctccagagtacctgggaccacaggcatgtgccaccatgcctggctaattttgtaactttttgtagaggaggtcttattatattgcccaggctggtctccagtgatcctcccgcctcagcctcctgagtagctgggactgtgggtgcatgccaccatgcctggctaattttttaactttttgcagaaaggaggtctcactatattgtccaggctggtctcaagtgatcctcccgccttggcctcccaaagtgctgggattacaggcataagccacaacacccaggccaatacgtctttatatttcaattatttaaaacagcctaaggacaatacttgcatcctaaatttcctcttaaaactctctggccactttgtactcaaacacaatatataaatggtacattttacaacttaattcaagactttacttatttattttggccaggtcctgttttcagcacagcgctaaagttccttttgctgggcatgctgtgccttatatatttttcaaatccaagatttttcccttgaccatgacagtagaataaaaagctcaaattcaagacagatactaatctaggacaccaacaatcgttccactgaggtgagatttttaaaaatgcaggaataaaaattctattataacattcactttatacatattcttcaatctacatgattacctaaaaagcaaatcatacatacattctttataatacatcaagaggaaatctatgagttaaaatggatatttagaaaagaaaataattacctttgatgcaaggttgtctactagagcaatcatagaattcttaaacaaggtagcagcagtcagaggtcgcttggtcacctctgtaatgctcagtttgccttcaggccacatattcttgagcacaggatttgaactgagaagcacagaaaaaacaattcaaatgtcacattcaaataagctggataaaaactgataagcaattctgctgaaatgtatcctgagaatcataattggactacagattcaactcacaaggcctaattggaatgatgattccatccagaaaattatgctacaagaataatgactgatactgcaatgcaaattgagatgtttttccaaactatagcatattttaaaaattatttaaacttctttaaagtgacatccttattatacctacctaggaccctcaaatggtcaatatggctcttacaatacatatataaaacaaattcatttttgtgatggttagaaaatgaggacaaaccactagtagaaaaatgatcctcaatgtcacagcagaaaacataaaagtggcaatatctttgaattaaagcaaataatttatatattaatagaacaggtaacactacagaaagcctgctctttaaaaaaaaacacaggtaggaatataaaataaccatttttatattgtccctcgtaaatccctttactgcagttcaaattgtgaacaaatctgtaggtagcattggcagttacaatattttattgatgtgacattaggactgttgcaatccaaatctaaaaatgcatttcaggccaattttcaggttaaaattgtatattcataattttgctctgtggagatatttttaaaaacgtgtagtgatctcaactgtcattttttttctggtttcattttgggtgcttttgatgttaaagcagttggaactcaaaatgttgcttgcttcctagaaacttttatcagaaaaaaacttttcttaaaaaattgggggttgagcaacccaaatgtccatcaatgatagactggattaagaaaatgtggcacatatacaccatggaatactatgcagccataaaaaaggatgagttcatgtcctttgtaggaacatggatgaagctggaaaccatcattcttagcaaactatcgcaaggacaaaaaaccaaacatcacatgttctcactcataggtgggaattgaacaatgagaacactcggacagaggaaggggaacgtcacacaccaaggcctgtcatggggtggggggagggggagagatagcattaggagatatacctaatgtaaatgacgagttaatgggtgcagcacaccaacatggcgcatgtatacatatgtaacaaacctgcacgctgtgcacatgtaccctagaactaaaagtataataaaaaaaaattgggggttgagaagagaaaataattaacattagcattcattgctaattgctcttactactgctaacattttacccactttttttccctcatataaaattttaaaaattgagttggatccccaaagcactcagaatatttctgtatgtaggtgctcaaaataatagctgcaagatgaaagagcagatgagcgcagagcgaagaagacaaatggtaatgtgtggattgactgggtctgtgaacacagacagagcaacactcccagcccccaccatcaccagcaagcagtgccaactactgtcaaagtggctacaaaatgctgcaataacctgtggcttatgaacccagtttcattactttctagtcctattccataattttccatttgtacacttatatcaaaatgactacatagatgtatattgtttttccttaactttttcattcttatctttagcacagaaataatttaaggcaacgttcttaacttacagtgcacatggtgcctgaatgccattctaacatttactgaatagaattttcagaaagtagaaaattgcactttgtgtactttgaaaatttcgacacatgttaaaagactgtgtcttttagtcactggtgtttggtctatgcagtttctactccaaattctttgtctaccttactcactgttggccatatttggagactattcctgtactacactgtaaaggttggaaatgaaggaaataagataatacgttaaatagcagaattgatacaaaatgaatccaaacagttgtagggagtcattttaaagagaaagaactttcaggccaagtcatgactgtaatatttttgtttttctgagacagggtctcactctgtcacctaggctggagtgcagtggtgagatgatagctcactgcagcctcgaccttccaggctcaagtgatactccacttcagtctcccaagtagctgggactacaggcacgtgccaccatgcctggctaactttttaattttttgtagaatggtctccctatgttgtccaggctggtctcaaactcctgggctcacgcgattctcccacctcagcctcccaaagtgctgggattacaggtgtcagccaccatgcccagcctgaatgtaatattaacaaaatagttttcaacatattttaaataccagaacccttatcttagaagggaagctcctccagagacccagtatgtataataggtaaggcagatctcatctggctaacaagacagcagtaaagagtaaaagtttgtgcacttggaatgcaaaatgcttgctcccttcctcccttcatttacacagacacacacagacacagacacacacatacatgcatgcatacatgtgtgtatattatcaaggtctacagaactagaatccaaggaacattgcttaaatataattatattgctgggtgtagtggtgcatgcctgtacccccagttactggggaggcagagttgggagaatcacttgagcccaggagttcagggttacagtgagctatgatcacatcactgtgctccaggctgggcgactgggataccacttctaaaaaaaaaaaaaaaaagaaaagaaaaatcattatattaacatatacaaagaaaaaatggattcaaattttggaaggttattagccatggaagcatcaaatagtgtccagagatgaaggtggctcattccaataccatctaggaggatggttttatccaaaaaaaaaaaaagtcaagacttcccatctcacaggcaaggcctttcctattatggaatatacacaatatgctgcatttaatagactttcaatctttcacccctttggcaaaactattcctattgtgaaatggattcatcttagcctgatgcctttatttgttgggtttatctaagttcctttgttctgattctgtgcttaccaggcaactaagtattctggattccatgggtaataatgaatcagagttctcactgctatttgacttcccaagcacgttttccaacagggaaaaacagcctgttacatgaacacaattacagttggctctccatatccatggcttccacattcaa[177 bp omitted]gaggcaggagaatggcatgaacctgggaggcggagcttgcagtgagccgagatcgcgccactgcactacagcctgggcgacagagtgagactccgtctcaaaaaaaaaaaaaaaagtaaattaaaaaaaaaattttttttaaagatgtttgtgcctgtgctagacatgtacagacttttttgaggggtcattattctctaaacaatacaacaactatttacatagcacttacatttcattaggttttgtaagtaatctagacatgatttaaagtatctgggaggaagtgtgtaggttatatgtaaatactacaccattttatataagggacttgaacatgtatggattttggtatcttcagtggaggagggtaccagatggaattaatcccccatggatacttcgggacaactgtattccattccatgttactgttagattttccactagaaataaatccacatgctgtttggtttctacactggcctggagagcctgggctatattagttcaccactgaaaggtgaagctgttctcagcagctgaacctctgggccatggtacattcacaaagttaacaaacatcacctcgtgcagcctcttggtacagagactggcaacacaccctgatggtactactggccaaataaggctgttttttctaagttgagcttttaacattttctgcacagagaaatgctggactctgtcatttgtccctcaaaatgaatgtaccttacctgataaattaagcattgaaattcccttctgaaagtcccttttccccatgcccagttcttccaaggatcctctctcacattcctgtctctgtaactttttactgatgatagtgccatcattaatcttggtggcttcaacatccatacagatgaatcatttgataacaattcttgaaagaacagtttaaacacaatgtctctatattctcatttcctgtattcccttgagctcacatcaatgagatatttgtcttcaatgctacatggaaaccagtgttgtcaagagtcccactgaccttggcattagcaaatccaatggtcaatcttggtcctctcatccctcctgcttttgacaagatttgatgtagtgtatcgtttttttcttctttaaacattttttcttggcttggcctctgtgacaccagattccttgtttacttccttcctcactggcatgctctcagtttcctttgctagttcctctttccttgtttgtctctacatgttacagtgtctcaggaattagtctttttaacctcttctctttttaaaactacgctcactccctagatactctcatctagtctatggctttaaatacaatcaatacactgatgactgtgaatttatatctctagccccacctttcccctgagattcagatgcatagttgcaattgctgatttggcacttttaattgggtatccaaaatgcacttcagacataacatatccaaaacaaaactcttaatttccctgaaccaattagcgtttcctcttgtcttctcctatcaggctcaggtatcacctttgatttccgtcttcctctcacaccacacattgtctctaccagcaaatcttgtcaactctactttcaaaatatcacccaatctgaccccttttcattatctccatcactaccacccaggcctcagcctgcattat[136 bp omitted]gcctcctgagtagctgggactacagacactcaccgccacacccggctaattttttcatatttttagtagagacggggtttcaccatgttagccaggatggtttcaatctcctgaccttgtgatctgcccgcctcaggctcccaaagtgctgggattacaggtgtgagccactgcgaccagcctcagcctgcattattaaaatcgcctcctttactgtctatttccatgcttgtcccttactgtgtgcattttacatagtagtagcagcagtgatatctttaaaacataaatcacatcacatcacatcataaattccaacgcttcccttcatactttcttcttatgtggactcaggctctttatgatccaggctctacctacctttctaaagtcactctttccatccctcactctgttttcagccacaatggccttgctgtcaatacactcaagctcattcccaccttgtggccttggtactagcttttctctctgcctggaatgctcttcctccagcatggctccctccttcacttaattcaggtctctgctgaaatgtcacctctataagaggccttttctgactaccctatctataattccttcccagcccctcctcatctgtacccttcaatctgttacctactttatttttctgcacagcacttgtcacaaactgaaagttgtttccttgtttattaactgtcacctttactagactataatctccatgaggccagggactttgcctacattttttcacagctgtatcccagaacatagaagaaagtgtgcctcaaaggtactcaatacatttttgataatctactgagcactgactaagcagacttaacaaatgagtgaatacagttctttaacccatagaaagatgaccaggaatcctctttcttcttcatggaccttctttttaaagtatccatactggatttaaacttgttatcatttgcctagttttattttgccataacttttccacattttgttggtttgtgagaagattctgtctgctcagtcactatcagggctcactgacactagatgccactctgatatcagagcggtctcttatttgggggtgaagacactacagtgggaatctgagtatgcaaaacttctagctgggccagatgtcacctgacacttcttcatcacactggcctggcctgaggactgctgagtatactggtaggggatgctggaaggctggcagcagtgagcacagaagctgaggcaacccaagggaaatcaaagcacatcatattattagcaggtccctgcccaaaatttatagattttatcatcaagttagttatatgctatttattaagtctgataaagcagaacaagaaaatgtgccagaaactcttaaaattgcatataaatataaccatgtgcatatattacatatgtcaatgagcttaatctagagttaattaataaaatttcaatcttacctgttatacataaggcgcttgaaatcttgaaataaagtatctttatttttgtcaataaaaccaatgacagaatagctaacagggaaaaatcacagaaaacatgtatcatttaccaagcaagagccacatttaagtttttccaggaggcaacaagcctttccaccgttaattatgcaatcaataatctaaaagctgatattgttcatcttgttctgtattaaaggataccaaatttacctactaaatagaagggaattttcatcagtactattatgattaagatgataattccctactggtttattgcttacctcaagaagatgactttttaaaagatagctgtatttatcatccagcattcctaagataaaagcaaaacagcaacatacaggaactaacagtctcatccgtagggaggtcaagtgacttgcctaaggttcactcagtgttgagggtaggataaaagattccaagaagaactgcaaaggatggtaataattggataagcagaggagaaaaaggcaggcagatcacacagggaaacagatcaaatggagtgacgaaagcaggcacatgcatggtgctctggagagagaatgaggaggccagtatagatggtttggaagggagatgagtaaggtcttgaaagtccagctaagattgcagttggtgagaagagtaggaatagaattgtactactcccagtgactggcatggactctaggaggagtgaattcatttttggggttataaaagtaattgacaactctgggtgattaagacagaggctaggagattaagcaaataggaactttagacacagctacaccttacagttctgctctcgtgcctgttttctctcttgacaatcagatcagtataagcaattctcagatctctaacccggattccttgccttacatatttaatcctgcaagaaagttccttcaggctgtgctgcccatgggtactttaaggttaccatacccaaaattatttccttgcctgccccgacctaggtcttcttaatactttcaagtcacttttgactgaacctttgtgatttgatctcaagctactcttccagatagttctacttctctgtgctacaaaaaaggatacactccaatcagatggacctagttgctatttcctgaatattttgtagcacccttcccacttcttcctataagaataattcctagcattcaaagaccagcatcagccttcctgggtttatcacacaaacctggaagtatttccttactctaaattccaaatgagtaattgctattactcatatggcaattattttagaccactgttattgtatacatgtatataaatgtttatgtgtatatatgcgtgttttcatgtgtaaaaataagaacacatacaaccatacatatatgtatatacgtatgtatcttacatggcagccagctctttgtgggaagagaccataccttatgaagtactgagcacatagaagatactcagtaaaaatccagaaaaggattgaagagtttaagaagtgaagaggaagtctgaggcattgaatatccctcaaaagggttagttgaagttctagactaagagtctagaaacctaggtattgtctcagttcttctgtaaatttgctatgtggcattgcgtaagaactttactcattctgcataagtttcttcatctgtaaaatgaagtggctggtctaggtcatctctaaggcctctatccagctctgcatttgcgtcattctgagtggtatgaaagtaccctgtaagtgaggcttggatttttagtgggagatatttgtatagtactggatcttccctcttcagtattatggaacctgggaacaggaccagaaaaagtggaaaatggtgccattccatcactaatggttagtttgacagatggtgtgataattttgagccatattattttatggtcctagaattttgatttaaatcaggaacagctattaaaatttcttcaaacatcatttcagcatttatagagaagatcatttacctttttttgtttaatctcttcctgcaatggattacatgtaaagaattcctaatgtaaaaactaagaaaaagagttctttaaacaataagatgaggagcagtgttcagtggacagtaaaggcataataaatatagtaggctaagaaatgcagccccaacaaaagtttcatatcaaattccctggaacctgggaatgttgccttatatcataaaatatgtgattaatgatcttgagaggagaagctcatcctacattattcagatgggctctacataccatatcaaatgtcactttaaaatagaggcagagcggccaggctcggtggctcatgactgtaatcctagcactttgggaggccaaggcgggcagatcaattgaggtcaggagttcgaaaccagcctggccaacatggtgaaaccccgtctccactaaaaatacaaaaattagccaggcgtggtggtatgcgcctgtaatcccagctactcaggaggctgagacaggagacttgcttaggcctgggaggcggaggttgcagtgagctgagatcgcaccactggactccagcctgggtgacagagcgagactccatctcaaaaaaaaggaaaaaaaaaaagatagacacaaagggacagttaacacagacacacaaagaggagggcaatgtgactggagtgatgcagctacaagccaaggaatgtccagtgctactagaagctggaaaaaggaacagactcctctctacaggaacctccagagagagtgtggccctgctgacatcttgattttgaacttttgaactccagaactgtgaaagaataagtttttgttgacttaagccaccgattgtggttaatttgttacagcagcccttggaacctaatgtactaaggtagttataatttttagttatactttctgatcaatttctactttattgtattgttaataaaaatacggctagtaagagttttactttttaaaataatatttggaaaataatgtagcaaaaatggtttttgcttatgcagttacccaactatttgcagatcttcatgtacaggagttattctcacctaggggcctttttatgcctactgtttcttctacttggaaagctttctcttttctctcccctcttcctaattcattcccctgactaaccctcttttacttttaggactcaatttggataccacttcctccagcaagacctctctatacccctctcagtgggttaattattcctacccactgctcctataatgcctgtgcttctctagtttaactgtttccattcttcattatagtgacctttgatggacgtacatgcctatactcttcactaaactgttggttctttagggcaaagaccatcttatccatctttctatcccagttcttaatatacttccatgatttattgacccgccagctgattcttactgaacacgaactatgccaggaactgtacgaaatgtacatgggcaagtagtgtgtgctcaataaatggttgaaaagcaaggaatgaatgaagctatgccatttttaagttgaacaaattaaaatatattgacatatcaaatgaccaaaacatgcaaatgaatataaaaccaatttacatttttcctggttgtattttctaaagtgaggcggcatgcaaatcatggtaggtaccaaggtaagatactcacactacatcgcctgcataatgtcgaattcgaaaatctcgatcaaactccagaattttgtctgaggcacagagctaaggaatcaagaaggatattattttgaaaacagacatttttgctttcctaaaaatatattccagcttaatatgaaatgatgataatatcacaaattatgacatcacattgtgtggggcttgatttaaaaatatggcttatgtattataaagactaaactttcactagaaatccacacagctagactacatttcctgaccactcttacagctggatatggccaagtaaccaagttctggacaatggaggtaaagtgtggctgttctaggcccaaactggtgaaaagtgaatgattcccctctgtgctttcttctctcccccaactagttggatgcagagggtagtccctaaggcatggaatagtcagaagatagaggaagtttgggtccctgagagagacacagacttctactatcttatgacactttaatcttggctacaggctaggcatggtggctcaggcctgtaatcccagcactttgggaggctg[134 bp omitted]tgggagaatcacctgaccatggaaggcagagactgcagtgagccaagattgggccactgtactccagcctgggcaatacagcgagaccctgtctcaaaaaccaaaccaaaccaaacaaaatttagctactatcttcatgcagtccagcctaccctgactgatagagtttctttctcctccttaaggaggaccatactgaaggaggacttaaggaggaccatactgaaggcttactagttgttaggcatacacatcttattcagtcttcaatgctgacatataaggtacaacaatctctctgttacacacatggaaactgaggttcaaagaggttaagcaattggcccaagatcacatagctagtaagtggtacccctggaaaggactcctggaatcgaatgtaacatctgtgctctcttatgtacatggaggcctggctcatctgtctgctaagctgagactccagttcaggactatcatttcacagaagataaagcttctgcagctccttttctccctgaagaggaatagtttatgggaaggcagtttttatatggctgtggaggtctctatgactttctacaatcttccttgttacagtagcatctagacttctttgtctgccctgttaagaatcacttggaatcttatagtttcttaagcagacatctaggagagtccacaaaagtttccctggggaggccaggcgtggtggctcacgtctgtaatcccagcactttgggaagctgaggcgggcggattccgaggtcaggagattgagaccatcctggctaacacagtgaaaccctgtctctatgaaaaaaatacaaaaaattagccgggcgtggtggcagacgcctgtagtcccagctactcgggaggctgaggcgggagaatagcatgaacctgggaggcagagcttgtagtgagccgagatcatgccactgcactccagcctgggcgacaagagcaagactctgtctcaataaataaataaataaataaataaattttcctagggaaatatacaaaaaccacttaggttctaatgttcgataacaaataatctcaacctgaaaggtgtattctattaatttgacaagtgaataattacaggaaattagagtcagacctccacggttcaaatcttgcctctaccatctactcactctgacttctttaataattacttatctcagagagttgttctgaggattaaatgaactattgagaacaaagcatctaccatacagagaggtctccaaaatacttagttccccttttctgctctctctcttattaaccccttttacaaactgttttatttataaaaccccttaaggaaaaggacccaagagatgtctacactaatggaacattcttacatttggatactgcaaagttgcaactgatctgaacacaggaggttttagatttttctttattttttttggtaatagcagttatgtatttatcatttaactttttatattaataatttaaataataattttatgctttattggattatttgcctgtctctccatggtaactttaatacggaagaagcaatgtagtccctaaatgaaataactgtcacaagacagaaacctctaatttaacatgccaataagtctagctaatcagtaacccgtagcaaatgatgatatccagctcaacacacagaatagcatgtgtaataaacagttcacagtgattaaaatattttgatagtttgatcatttcttttcttcattaggtaaaaatcccaaagaagaagacatttaaaaaatctctatctcaaagaaataaaaggtattcaaactggaaaacagaagtcaaataattcctgttcactgataacatgatctaatacctagaaaaccctaaagacttccaaaagactcctagacttgataagcaacttcagtaaagtttcaggatataaaatcaatgtacaaaaataaataagcatttctatacacgactgataacactgaagctaagaaccaaatcaagaactcaatcccatttacaatatccacaaacactcacacaaaagaaaaccctaggaatatatttaaacagggaagtgaaagatctctacaaggagaactacaaaacactgacaaaagaagtcatagatgacacaaaaaaatgaaaaaacatacaatgctcatggattggaagaattaatgtcattaaaatgcccatactgaccaaagcaatctaaaaattcaatgcatttcctatcaaattaccaatgtcatttttcacagaattagaaaaacaatcctaaagttcatatagaaccaaaaaacagcccaaatagccaaagcaattctaagcaaaaagaacaaaaccagaggcatcacattaccctgtcttcaaaattatactacaaggctattgtaaccaagacagcatggcactgttacaaaaatagacatatagatcaatgggacacaacagagagcccagaaataaagctgtatacctacaatcaactgatctttgacaaagttgacaaaaataaacaatggagaaagcatacgctattcactaagtggtactgggaaaaatagctagccatatacagcagaatgaaattggacccctgtctctcaccatacccaaaaactaacttaagatgaattcaagacttaaatataaaacctgaagctataaaaatcctagaagaaaacctaggaaaaactcttctggacattggcctaggcaaagaatttatgaccaagacctcaaaaacaaatgtgacaaaaacaaatgagacttaattaaactaaaaaggttctgcccagcaaaagaaataaccaacagagtaaacaaacaacctacacaatcagagaaaatatctgtaaattatgcctccaacaaagaactaatattcagaatctacaaggaactcaaataactaaataacaaaaaaatcacataaccccattaaaaagtaggcaaagaacatgaacaggtatttttcaaaagaagaaatacaaacagccaacaaacatttgaaaaaatgttcaacatcactaatcatcagagaaatataaattgaaaccacaataagatatcgtcttataccagtcagaatggctattactaaaaatgtcaaaaacagatggcatggatgtggagaaaaggaaatgcttatacattgttggtgggaatgtaaattaatacaacttctatgggaaacagtatggagacttctcaaagaatgtaaacatttcttttaaatggtagttctaaaaatagaactaccatttgatctagcaattccactaccaggtataacgaaaagatatttgtactcgtatgtttaccataacattattcacaatagcaaagtcatggaaacaatcaatctaagtgtctatcgacaaatgattggatagaaagaaaatgtgatatacatatatataatggaatactatgcagccataaaaaagaatgaaaccatgtcctttgcagcaacaggggtagagctggaggccattatactaggtgaaataatgtacattttcgcttgtaagtggtagctaaacaatgcatatgcatgaacacaaagatggaaataagacactggggactccaaaagcagggggtgagagttgaaaaattacatattgggtacaatgttcactatctgggtgataggtaagctagaggcccaaagtttacctttatgcaatatatccacgtaacaaacctgaacatgtacacctcccagatctaaaataataaaaataaataaataaacaaataaataatcactacctcagcacttgtcttagggataccaaaagaaagagccacttggtctgaaagttgggaaacctgggctcccataaatttgaaaaagaaaaagaaaatcctctccacagacaaattactatttagcatttcatgtcaaatcagtagcaaatactgatgtggtatgtacagttactcttacaaatgacatggctgggcgtggtggctcatgcctgtaatcccagcacttgtggagacccatgtgggcagatgaactgaggtcaggagttcaagaccatcctggccaacatggtgaaactccgtctctacaaaaacacaaaaattagctgggcatgatggcaggtgcctgtaatcccagctacttgggaggctgaggcaggagaattgcttgaactcgggaggcggaggttgcagtgagccaagattgcaccatgcactctagcctgggcaacagagtgagactccatctcaaaagaaaaaaaaaaaaaaggaatgatattatatttcaaaatatttggttgacacatttaattcaggtatataaatggccaaggtagaagatatcaaaatgaggtggatttgatttctcatgtgagactcatagctaatttaaatgaaaatttaaataagatttatttgacatgattgggaacaattcaattcaactttacaaacactgattaaatgtctaccatctggtaggcaccgtgctaagtgagtctccaaacctgaactgtgattataaagggcatttataaactttccctcaaagataggacatttgcccatgtaatcatgccatctttaaaagcatcactctaaattatttaggtgacttctaactttgcccagtactctgtccccagcacctaggattgcacctggaagatgagaagcacttattaggtatttgtggtgtaaatagggaatgactgaagcagtacctctaacccaaaaccctaacatgaaagagcagactgtagtatctgaaagccaatttgtagtagggttactatcaatcctcagtaacagaccaaggagaatattttagaaaaaactggcctaaaataaatgtcagctagtaatctatttcttgacgatttgggctttagctagttaattgtggaatttctctgttctgattacataatttcaaaggagataagttagaaaatagactttattcacactaaaaaatggcagtgtcagagatttacatggaactctggagaggcagaaatgtttgccccctttttctatggatgtgaaggagcaagggcctgttttccctttagcatatggttactagacaagactatgggtagggaagtctcaggggcgatgatgatgtgttcctcttctaacacaaatttcttgaacaaatattaatagcaaacatattccatgcaaatggaatattccatgcaaatgatatgtccatatcagcacaaaggtctgataagcacaattgtcaccaattactacagatatgtgatctgtttatcacttttttagatcctgaaaaatggagagttaaaaggatacccatttatttaatgaataagtttctctgtaataactagaattacaactagaatctctctgttttcaaggaagtcatatgatctgaagaagtacagcagagtgcacaacacattttgttactgaggattacagtaaaaagtcaaggacaaaagctattttccatgccagaattatcagatgcaggagtaaaattctagcacatgagcaaggactctacatctattggttacaaatgacatcatgctttctaaagaatcatgctcatttttcctgtttctaccaaattgcatagtctggagctccctctcctggattaacatgattttatcaatttcttcatactataaaccagagaggcagaatttatccacagcaacaaatcatttaatgaatgtttatgacttttctttcttattaaaggggacattcttttatcccaacatataaagtcgttgaactccatcaaacaataaggagaacctcacagataaaaggaagaaggtgtcattaaacacattacctttcggctggaaaaatgggcgtgtttgcccaatttactgttaagtgcttcaagaaacatttcatcggtgactttgccgacattcatgcaagcatcatcaaggattgcaatgatccctttgtgctgttgctccacgaggtcaacaatgatctgattgttgaagtagtcaatctgtaggacacagcaaggagggaattctgaagagaacagtgaccaggccaggttaaaccctgatgctcccatttgtatcaggagttcaggtaaaactactttggtgtcaaatgtgtgaataacattaaagaggtcttacgctaaaaagagtacacattctaacagaggtttatttttaaatttctttgttaactttctatcatgaaatacaccgtctgagattagtacagcccaaggcaaagataataaggtagacaccatttctcccattacaaactcattttaatcctgcctccagatcccacacccaaccctactccttcataccaatctgcctgccattaactgtaaggtccaccttccacaaagggccaacaaataaccttaaagtattatctgatatactacttcataataaagttaaggtactacacaaaacttgcaattttataaaagtagggtacaagttaaatgtttagttctagaaattttgtgcaatatgttcataacgatggctgcagttgccacaaagtgcctcgtttacctttaaatactgttaatgtgtcacgcatgcagatggaaggggtggaactgtgcactaaagtgggggctttaactgtagtgtttggcagagttgccttctacctgccagttcaaaagttctgttttcatgcagaatatatatactaaaaaatttcagtcttttaaacagccttactctgattcagcctcttcagatactcttgtgctgtgcagtagtggctctatgtgtaaatgccatgcactgagggtacacaaaaatatcaacattatgtgtacaggataatgcctcatcccaatcagatgtccatttgtcattgtgtttgttaacaaccctttatctcttagtgttaaataaactccacttaaaacggaaaaaaaaaaaaaagaacttgcatttttagttacatgaccctgaatgactaaaatccaaaagagcatttcttttggtttccccaaagttaaaaagcttcaatagaattttgaacaatttgaaaaaattcagtagaatttttacatttttctaggcataatataaagaatttaattctgagaaataaatatctataaaagataagaaaaagcttttcctttacttccacaaggtgaatgaagttataaataacttctggcttttcagcaactatacatgtacaaggtttgtccaacaatcctctgccacacctgtttattctgacagcctgcaatgtacctatcactacacacagaaggcacacaaagaaaggccaactcaggcaagctgcacatctcaaagaggggcagcttatgatcacacagtttaatcttgctatgtcccatcttacgcaggagttacctaaactgattgctgtctccattaccttctataaggtctatatactcataatagaccattcaagtgactcatgtattcccatttcatgctttaaaatccaaggttttatgccagttatttgtacatggcttttagctccatttctagtcttgcatgttctcttctgtatcttatggactgaaacctgtaaactgggtagtttttactttgttttttatacttttctgatctgtctaaactaaagtttctcaaataggggaatagggggaattttgctcaccaggggacatttggcaatatcaggagacatttctagtcaaaatggggtaggggtgctactgtcatttggtgggtagaggccaggggtgctgctaaacatcctacaatgcatagaacagcctccacaacaaagaactatctggcacaaaatctcagtagtactgaggtgaagcagtgtaggtctaaatatttactttcattatgggcatttattacatttctaattagggagaaaagttatttccatctttggaaaaaaaatcctaaaaatactcaaaaagcaggagctctatattaatagttgacatcttagacttcgggactgtgaaattaaagacgaagtcttttgtcccagggactaaagaattaccttccctaaaatcccaattatattattaaaagctattggtctctgctagtaactttcagtttgtaagtttaatactgcttcaaacattgcttaaaccagtagttttcaaactaagttcttccagcaacttggcattcccgtaaggtttcctaagggataccaggagccagaagacttgtgatggggtagcttagggacatggggctctggcctttcatacccactccagataaaacagctttgtgcttgagtatcaagttctcaatagttaaaatgatttgcaaactacagcatcgaaagcttttaaaagtgaatgtaccagataaccagacattatgaacctcctggtggaagttcacacacagtctatgaaatgggctgtggaaaaaaactgactctgaatccagtcaagactctagatctaacaaccaatatacaggacatacaagaaacagagaaacatattaaatggcacctgaggaatgcaattagcaaaatccagactgtggggaactccataacaaatgactcattctcttcaacacaagattgcaaagagagatcattcaaggaaaaaaagaaacatggagaaaatctatagatatgcaagagacctatcaatcaatcataatgtaagaaacttatttggatccaaatttaacctgcaaaacaacaaccagaagacaattaaggaaatatgaaacatgtatactgactggatattttatgatattaaggaatttttgttaatgttttaggtatgataatggcattgtgattatggtttttgtaaaactctcttagagaaatacatggaaatatttactgaatagatacccaattgaatagatgaaataatgtgatatctgaaatttgcttcaaaataatctgggagtaggtgggtatagtacagatggcataagactggcaatcaactggtacgtgttaaagccaggtgatgggtatatagggtttactgtactatagtctgtcttcttaatgtgtgtttaaaattttccataataaaaaatcttttaaaaagaatcactatgtttagaagtttggggttttacccagaatagagattctaattgtggggggatctgccatgtagtaagtaactgttaccttggagttagccttctgctccctctaggacaaatagttcttggtttatttagcgaaaattttttgcattttgggattcttaattctttttgagatgtttggaacagtccactgcattacttaccctgttgtcaattatgtctgtgaaatttgatattctgattgtgaaaggatatttttgactagtaccttggaatcacatttgaataacaagttttatgattaaatttggtattaaaaatccaagcttcagttataccgtgtattatattatacaacagtttcattcttagaaagcttcatatacacttaattgaactgaattaaattttaattgtattaggagagttcattatttaagtcaaactatagataattcttatataaaatagccctttggtttatatgcagataggtaaaatttatgccaatatacctgagcaactgttttatggtattctaacgtttaacacatgatggaaggcagatacaattttgaggcgggaaagctatttgttatatcactgtctctttatttcagaatgagaggaaatagaaaataggtaggaaggaagataaaagtcatttaaatatagtatttcaaatatttttttgctgctattatattggataacaaaaaacaaatactggcttcatttctattctctggcaagaggatgaacaatcatataaactcaaactacagaaacttaaaagtttttgtatttttcaagtttattctcaaaattgcttaaaaatacaaacttacaagaaaaattactatgtctcatttctatcataaacagaaggtcttatcacaggaaatttaaaaaccaaacaagtcatgccttttagctttgatctctgtggtttgcactgtgcacccattatactttccagctatatcttaccagattagtttgcctctgacaaatacaaaagttcccaaagattgattagagtagaggtgataattgaagtgtaatacacaagaaaatgcaaagtaaaacaagtattttaatgtgtaggtttcagagaatataaacaacattaactgaagacaataaaataccatatagtctacaaagtagaagaggagaaaaaggaggaaaaagggaagaagaaactagattctgaagcaaagttcagccaatttaaggtataacttaataaagtatgctaaacctaacagacagatataaaccagtaagtccacgtggtagcagccataaagtgaaaacaggtttactggttctaactcaggatgttctgggcatcaacaaggcagtctatcaaattatagcaatcccacctaaaaatgatgaaattaattgtatttacatatcccaaaaaggaaagctaaggttcagatgtttcaaatacccccaaaagatcaagaaatacctaaaataaaatttgacattatcaataatatgagaaacacatgaaggcattttccataagagtccactcacatgtttccaggggatcccttcccgctggtattcctcttgttcttgcttcagaaccagctgaataaatagctgctgcagtttctcattgcagtaattgatacagaattgttcaaaactacaagaaaaggaataaattaagtttcaacaaatagaaaacaggcaacaaggttttaagtatcttttccagtttacctgttgttgtcaaagatttcaaagccatagatatccaagacaccaataacagtgtttttcccatggattgtggtgtcatagttcttgacctcaataatatcattgatgcgagtaacgatccaacaaaaaaggcgctcatatattgcctgcaaggaaaatagcatcataaatgcttgccaatttgggaatgagtcctctgtttggatttgtgatcagttttaaattcctgtccaccttctcactgtttagcatagccattactggcctcagcagaacaaatgaaaatgtagactgtccatttaaaaaaacccaaactacctgatgtatgcaaaactaaagtaaatagcttgtatttttaaaagattattaccggtcattataccaattccaacgacactctccaggcatgtttccctgcccggctatatcaatagtttgcctgatcccttgaataagccagttcattgctttattattaatttcatcaactataaagagttgagagctagtgagttaatatctatgatccactaaagctatatgaattctaaaaaatataaatattgatttctaatgctaaatgaagatctgagccaaagatcaagggttgaaattccctgagaatcgaacacacatccaatgcacaagaacacacacactaagccacacatggacaaaggtgccacacgctaacacacattcacatcccgatacacatgtgctctgcaacgtcacatcgttagaaaaccttccttaacgtctcctgccagctacccactctcttcacccatatccattacctcccctttactcttcaatccactccagtctccacttacatcctattactccattgaaatggctcatcaaagactcccagcacctctacatagatacttctcgtacctcatatggacatcttgctctgtcgctcagcatcactcaacctaggttttcactgccttcttggaacactcttctctctggatttcggataatagcctttctgaattttactctttgttcactggatgttcctttttggtgacctttggtagagtctcctcttctacctgacttgtaaaagttggagttcttcctggtcctcttctcttcactctctagcaccttctaaatcatctcacccaggattaaataatacaaatataatatgactcccaaaagtattatccaaatccagactcagagaacagtctctgagctcctgactcaagagcttgactgtctacctgacactgactcttcaatggctcacagccatctcaaactcaaaggactcttgatctttcctcttccaacaactgttcctatcctacttttagccacaaataaatagcaccacttagaaattcactgatttattcaacaaatatttgctgaatacttattatatatagtttgttagagatacaggtctaggcaaacacaaacatagtctcaatgtccaagaaacttagggaatagagtgaaggaaaaaattattctctctgtctctctcacttgccccccacctcgcagataaacatccacactaaaggagaggtacatggggtcttagggaaatttaatctatgcagtgctcaggaaggttagggaaggcctctctgggaaagtgatacttgagaccagaaggatgagtaagaggtagccaagcaagagaggagagaagagcagtccaagcagagggaacagatgtgcacaggccctgtgactggaaggagaaagggatcaggataatctgtgaggactgagagaagactaatgtgctgggctgaagaaaggggggctgggtatagtataaaatgaggtgggagaggtgggctggagccagaccatgttaaagtattattcttgcttctctcattctccacataataggtcctatggattttattttctcaacacagtccatttcaaatcatcctcctctccccatttgtactttcacttttctgattcaagctgccctcatctctttcctggattaacaaaatatccccttaattgacctctttgcttccattcttactctagcccccataacattctccatactaaggccagagtgatcattttaaaaatgcaaacttgccaggtgcagtggctcatgcctgtaatcccaacactctgggaagctgaggtgggcagatcacctgaggtcaggagtttgagaccagcctggccaacatgatgagaccccatctctactaaaaatacaaaaattagccaggcatggtggcgggtgcctgtaatcctagctactcaggaggctgaggcaggagaattgcttgaacccgggaggtggaggttgcagtgagctgagatcataccattgcactccagcctgggtgacagagagacaccgtctcaaaaaaaaaagaaaaaaaaaaaaagacaaaaaaacggccgggtgcggtggctcacacctaatcccagcactttgggaggccgaggagggtggatcacaaggtcaggagatggagaccatcctggctaacatggtgaaaccctgtctctactaaaaatataaaaaattagctgggcgtggtggcggtcgcctgtagttccagctacttgggaggctgaggcaggagaatggcatgaacccggaaggcagagcttgcagtgagctgagattgtgccactgcactccagcttgggcaacaaagcgagactccatctcaaaaaaaaaaaaaggcaaacttgatgtcattgcccctccttaaagtcctccctattgctctccattgcacttaggaaaaattcaaattcccccaaaactaaaaaccaagcctaagacttacaagagtaaaaaatgaaatagacagtaaactaatcaaccagcaaaacaacaacaacgaaagttagacgtgagaaaatacaacgcttgccacacagataacaaagggttaaagtttatgatatgctaagaacacttagaaattgacaataaaaagataacagctccaaagaaaaatgcacaaaagatatacccaggcaattcttagaatatgttaaaatactctacaaaaatatgataagatgctcaaatatactagtaatgaaataaaagtaacaataaaatatt[145 bp omitted]atggtgaaaccttgtctctactaaaaatacaaaaattagctgggcgtggtggcacactcctgtaatcccagctacttgggaggctgagacaggagaatcacttgaacccgggaggtggaggttgcagtgagccaagattgtgccactgcactccagcctggatggcagagcaagactccgtctcaaaaaataaaaataaaataagtataccctttgacctggcaagctcactcctgggaatccatccagctgaaacaaaagcactagtatataagcatagatgtataaagacgtgcagcattgtttgcagttgcaaaaaagggaagtaaagtgggtgacttaagagtaaggtggttaaataaattgtggtactatcactgcaggcttagtacacagccctggaggacattatgctaagtgaaataagccaggcacaaaaagacaaatattgtgtgatctcacctatatgcaatctgaaaaagtcaaactcatagaagcagagaatagaatggtgattaccagaggctagaggagcggggtggatggagaaagtgtgagacgttagtcaaagggtaaagtttcagttagacaggaagaataatttgtggtgatccactgcaaagcgtggtgactgttaataataatactaataatattgtttcaaattgctaagagtggattttaaatgttctcaccacaaataaatggtaagtaggtgaggtaagaggtatgctaattagtctgatctgatcattccataatgtgtacatgtcctgaaatatcccactgtacccataaacatatacaattattgtcaattaaaaataaataaaacttaaaaaaaatggatcagagctcagtcagttgactctggcgaagcattattgagtgagagaagcagcacgtgaagccctcatgagcgccacccccagtcagcttccactcttctcagaaccttttttggcagtgatgcttacttacatctgggagttttaccgaggcttgtatggccagaaagtatcattatggtttctaaaagccttaaccctctttcaagaatgtctgaatacatgctcacaggatttcactcaatttgcaactgcgatcaacaccaggtgacatagggtcagttacactctcaccttggcaaaggcgtctctgccgtagctggcctcttgttctgtgtgctgcttgtcaatgatgtcacggcctgtggccacagtccggtaaagaagggctttctcaaccatatctgtcttagtagagagcaattctgctatgatagatactactttgccattctcaataagaggcgtgtcaccatctactacaaattttaaatttccctgtatcaaaagtgaaaaaaataacacattatgaaacattatgtcaaggatatatttgccaatataaaatacaattcaggtgaccttgtttgtacctattttcctaaatacattatacatctcaacatataaaaacagtgtttcatctactttttccctttctccggacactcatctatctttttgctttcagtgtatgtttttgatagataaaagttttacatttttatgtaatcgaatctatgaatcttttgccttagggtctctctttctttggtgtcatacttagaccattcctactccaaagggtttatgagcatttgatgctttcctctaatg[143 bp omitted]ttctcctgcctcagcctcctgaagagctgggactacaggtgcctgacaccacgcccagctaattttttgtatttttagtagagacagggttt[144 bp omitted]acatggtatcaagtaagaatctaactttatttttcacatgattagttgctctaacgggacttattgaacagtctagctttttctgatttgaaatgtcaccttttttttgagacagggtctgtcacccaggctggaatgcagtggtgcaccatggctcactgcagcctcaacgtcccaggcttaagcgatccttccacccccagcccctctaaatagctgggactacagatgcgtgccaccatgcctggctaatttttgtattttttgtatagatggggttttgccatgttgcccaggctggtcttggaactcctgggttcaagcaatctgtccacctcaaactttccaaagtgctgggattacaggtgtgagcaaccccgcccagctgaaatgtcacctttttaatatgttaaatctcctcaagtgtttgagtctatttatattccactcattcaataagcaatacatacttataaccatctaccaaatgtccagcacattaaccaatcagttgattaatctgttgatctggtgctgaacttgtgcaaagttataaagtactctagcttttactatcattttaagtttggtagaactagtcatgttccctctcctcccttaccctaccctatacgacacttctttaatatactttatttgatctttttccaggtaaattctagaatcaacaggtcaagttaaaaacaaaataaaggccaggcacagtggctcacgcctgtaatcccagaactttgggaggctgagatgggcagatcacgaggtcaggagatcgagactgtcctggctatggtgaaaccccgtctctactaaaaataaaaaaaattagccaggcgtggtggcaggcgcctgtagtcccagctactcaggaggctgaggcaggagaatggtatgaactcgggaggtggagcttgcagtgagcctagattgcaccactgcactccagcctgggtgacagagcgagattccatctcaaaaagaaaacaaaacaacaaaaaataaaattcttgtttggattctgaaaaggactgctgcactgtatttaaaaactgattcaaacagatgagacaatttataatactaaagtcttcctagtcaggaacatttattgtttatattgctatataatatttttcataaagatcctgcacatttctgattcatttagagttaaatcttgctatattaagtgaaaagtaatttttattccagatttgaatccatgttgtcattcttattgtaagattatatgttcagtgtattttaagtatctctaattatataaatgttaatgaaagaaatctaacacacagttcttcacttctaagtttggtgtggtatagtgggaaacaagtggcccaaaagtggtctatggtgttggctctgggatgagctggctgtgcctttgaggtagtcatgccacccatcagggctatttcccaatctgtaaaatgagatgattaaaaatccagttccgataacctatgattctatgtttcaaatgccactagaaatttataccactagtagtcacatcactgctgaattcctttatccttaaaattaaccagttcaaagtttgacaataccagtaagacaatcaactgaagtagtagtctccaaccctatagtagcttggaaaatccctcataatattataaaatgatggcaagaaccacagacatagtaatttcttcaaaatacgtacaaaattttctctgaatactttttaaatctacagggaaaaaacaaaatcttctgagaaagcatcctgttctcagcagaagacaatacattctgagaggtgtccctactcaccaagtgcagaatagcagccaaaatcttatacactgtttggatctcctcaggtttgaagccaatgactttcatggcatcagcaacaactctgaattcggcagcatcattgatagaagactggggatgaaaatgaaaaactgaagttacagatatttcctatgagcattaaaattcaacaattataaaactaagttataccaaggttttgccttcatagtaaatcacttgaggggatggtgagtctccagagaaaataaaaatgatttcacgagttgcaacattattcagcacgtacaaagcccacttgtgcgtgaaagccatcacctaaaataagcactgtgccgttttctggaaccttcagtgagggagcaagtcctgagctggctcagacaagctgatcccccactccatgatcagtgaaggcaacagcatggatgtgagatcacaaatgcaagtgctgaatgtgggagcctccaagatacatgcttggctactgttgtttgtggctctttgttccacaattgtcttatttaggctggcaacaacacttcactctcgtataatcaggcggtttattttccaggtgaggcaaggcgggccctcaaaagcaaaacagccagcctcagtcatttagtaagctattaaatagtctgggactataacttcattctttcactcacttgatacgcatttcacaagtcagctctactaactggtacaggcagctcaaagatgaatcgcctgcccttttagagctgtggccatcacattggaaatacaagtgcgtaaacagaaattcgcaataaagcaatagtaactgcttatattagttttaccacagcagcagccgcagaggcttgaccaattctttcctcagtaagtttctcctcttgtttggatacagagacctggcctgatgctcacttgttgaggaagggccctggaaggggacctctctgcctggtgagtacaagttcctctagtgtccaggagacaaccaggccagcccctcctcctcctaggtttttgtttttaccttggacaagatacttaacctcattgaacctcaacttcctcacaaataaaatgggcataataacatatatcttacagggtggttgtcagaattgaatgaaaatttatataaagcacctctctagcaccagcatacaaaaaaaaaccactcagcagtatcagatattactattattataaactgcaaccatgttgaagttggaaagtaactggataaaatctaaatgtcctactgtggggaactgttggctgcttacctaacagccatcctctaccctcatttctttcttgccaatcgaaccctgatttgtttactcctctctaagtgtgcatgtcctttgtgactggcatctacctagcctcaagaggtaaatcttcactggtctaaactcatcagagtgatcttatttcccttactaaatgactggttagccacaggcatgggatgccattctgatcaatacaacatgagggaaagtgtttatgggggatgagtggaggagggttcttggggaggtttccctagcttataaaggacatatgccatgaacatctcctttgcaggtgactcctggaaattctgatgacattttgggactaaaaggaaaaccagcctaagaggacagagctgtccatgagtgtggcagagttgtaagttggggaaacaaccaaaaaaacacctgggtccctgacaacattgttaaggcaatgaactaactaattctggaattgtcctatctcagagtttcttgttatgctagataattaagtttcttattgtttttggagacttttaattgggtcttctcctacttgcaacccaaaatatcttaactgtatatgactcctgcattttagaactggttaagatacacacagtgcaatacttaatagttataaaaattattatattaatttatatttgtttgcatggaaagattataataaaaacaggtttatttaattaggatttattgtatgattccatttataaatatagatgcaaaccattatcaataatcatttctgtatggtaagatttagtgtatttttgtttccttttggttcatagtttaggttttgactatgatcatttattagttctttgttttcttaggaagcaaaaaaaaaaaggtggggaaagcagacatggaaatttttgataaaaagggaatctaagctaaatttaacctagaaaaaaggctattaatttaatacttgctttctgtggggactctacacgacttggtcaaaagtaacttagtcgataagacaatttgaaaacaaacattcccagtcactggctttccaggtgttgatttcacaattctttaagtgcctctggctagttctcagagaggtggagtgttgccctctactgttttttgtttttaattcattttcagccaaacatcctgctcgctctcagatgaccataaaagtaaagttgttgtaacctaaatgtcaaataatggaaaattaattgcaaaaaccaaaatatcattaatttctatgcacagcaataaaaatacagctaaaccaataatgcaggtataattagcttattttgattaatagaattttttaaagaaatagctcccatatcttagatctttttcctttacagtttcttttatttctcccccaaatatgaaagcagtaagtttttgatgtagaatttttttaaataaggaaaaacagaacacaaatatccataatctcacccatctagaataaataattaatactgtgatctatatcctaccatatcttattatatgcatttatataccttccctcctacgaaataggataatagtgtaactattatcaacaaactattattataattagttgtaaaattactagatgaactagaaataaaatgaactagaaataaaagagcaaaaatacgcctgcatgtaagtgtatgcaagtgcttgcatgcaagaaaagagaaaaaatggaaaaacttgaaagctgaataggaatgcctcaaaggtcacaaaattatttctagggtacatcaaaatcaacatttgaacaaacagtgagtggagaatcaaagtgcattttaattttgtcttactaacttgcctttggccaaatcatatggaatcttcttaggaggtaggcttcctagtcctatcaatatttttatagtgtgaaaataaacggaatagggataggattaaaaattaaaataaaacattgaatgtaggaaaaaacttctttcctgtcagatggtgataaaatatcataattgattttaagcaaagttgttgattcaaaaatgtgctgaatctctgtccttgagaatttaaaaaatagaacaggataaaagagatgtttatttgcctaaagatagcaggcttgaccagataattattgaatgtctcttctaatcctttgactgattttctattggagcaatctcaaagaggaaattctcacctttaattgagctcccacatgaatatagttgtaggatgaaagggatttctggagatgtagagagcgtagcatttgttctgaacctccttggagtagctgaaaaatatttaattagaaataaattggccagacatacattgaaccaaacatgaacttagtggtaatctagcttttattcattttctgggcttaattcacttatgtcttcctgtttctagctttgaagttttgcttgtttgtttttttaaacattcaaggtaaatggcttcaatgtcatcagttacagagaatgttatgcagtcataaagaaaattactctgaaaatgtctcatctcatttacaatataactggcataaaagtttcttgctttgaatgccgtcatttgtaaaacaggatcctatgctctgtggtggttgcttgcttagcagcctcactatagacaggatatagttctgtctcagaatttagaaaaagtcaatattgctacggaagtaagaaacatcagcagacagtcatatgctgaatcacactggaaacaaacagcttttcctcatcaatctgtacctctcaggaaaagaggacagctggggaaccatgattgtagtattggataaagataaattttaatactttcacccaagtgggaagaacactgggaaaaagttacaggttattgaaataaacagaactcttttatatttggtagaaaaatagcttatttaaaacatggcaaattgccaacagaaccataaacacaatattgacagtgcttttatatagagcatgtttttggaaggtattaggtttaaattctctaaattaaactgtatgcttttgtttacttaaaaagtctaattatcagattttaaaaattgatttttaaacttaatataccagaacttatatatacaaatgagtagtgtctattaaagcagttacctagaagaaactgaattcgactgaattgcatccaattgtattgtcaccgttcagttactttctgttaaccttgatttacattaatttgggctttaaaaacttacaataatatatcatacttgttttctaagtgtaaagacttgccaacaggaaggctatttaaaagattttgctttaaaatctaaaagcactcttgaaaataaatactcaaatttttttctaaacttgatggattaaaaaggcaatcctccctagaagttataaatccagattgtttttttaaaagtaatcatattgcttttagtgtgtatgagtgaaacaaactgaatttgtattctgatctctagaactcccaaatatggaaacaacagcttcaattcaaaataaaacaaaaattaatttaacatttagaatgtaccatttcaaaagctttcacagtcattaaagtgttatctgtactgcaagaaaatatgggggatgctcacccaaggcagtcatctggttggctaagctcctgccagctgggtggaacagtcatgttcatccaatctcttaagcaggtagggcagggcatgtggtgcgtgcgtgcgtgcgtgcatgcgtgacatgttacggggccaatggagatgagtgatgcataggacaggggaaagcccaagacacaaatactcatttcctgcacaactgggcaaatgatcaattatctgtataatggattactaacctgatagaaagaatgaaagcttctttctcctggctgttgcacaatcactcgagactaagaaaaaacacattaaaatggttaacccgaaaatgtgcccctaaaataaaacaggagccactttcttagggaactgtcaggcctctgagcccaagcctgcacgtatacatccagatggcctgaagcaactgaagaatcacataagaagtgaaaatggcagattcttgccttaactaatgacatttggtgccgtgacttggatcgggggagctcccttgggagatcaatcccctgtcctcctgctctttgctctgtgagaaagactgacttacgacctcaagtcctcagaccaaccagcccaaggaacatctcaccaattttaaatcaggtaagcggcctctttttactctcttctccaacctctcttactatccctcaacctctttctcctttcaatttcggcgccacccttcaatctcccccttcccttaatttcagttcctttccttttctggtagagacagaggagacgtgttttatctgtgaacacaaaacttcagcaccggtcacggattcgggaagacagtcttcccttggtgtttaatcactgcagggacgcctgcctgattattcacccacactccattggtgtctgatcactgtggggacacttgccttgatccttcaccttggtggcaagcaccactttcctgggtggcaagtaccaaccccaccccactccctacccccaccccccgaccccggcccatgtctctaccctctcttttctctgggcttgcctcctccactatggtcaaccttccaccctccattcctccttcttctcccttagcctgtgttctcaagaacttaaaacctcttcaactcacacctgacctaaaacctaaacaccttattttcttctgcaataccacttgaccccaatacaaactcaacaatggttccaaacagccagaaaacagcactttaaatttctccatcctacaaggtctagacaattattgtcgtacaatgggcaaatgatctgagatgcctgacgtccaggcattcttttacacatcggtccctccctagtctctgctcccaatgcgacttgtcccatatctttcttctttctctcctgtctgttcctttagtctccaccccaagctctgagtcctctgaatcctccttttctacaggacctctcccctcctccccaggctgtgccttgccaggctgagccaggtcccaattcttcctcagcctgtgctctcccaccctataatccttttatcacctcccctcctcacacccgatctggcttacagtttcgttccatgactagccttcccccacctgcccaacaatttcctcttaaagaggcggctggagctaaaggcatagtcaaggttaatgctcctttttctttatccgacctctcccaaatcagttaaatatcctaaagacccccatggattgtatactcatctaagaatgagtcttctctatggggtttcccctgcaattctttgataattctttttattgcttaaaacagaggtccctaaaactttctgaagaatgaagctattttgatttttttaacctggagcctaaagatggaatttggtggttgggggtggggtaagaattagaagtggggagaataggaaggaatgcttagggaggaatattctcaacattcctttccccagggtctgctggcatttcaaagagcaatgccttatatcctgtaataaaagtcagttgagcaagatcaatccatagagacctctgccttagatggttccaaaaatactgctgttaggagagggttcaaaatatgagttcattcaaaaggatccttttgattgaatatgtattacacataaagtgaactgatgaaacattctggaaaaaggactgataataatacctggcatttcctgtcctttttcaactgactctgataatacatttatttccttaacagtccgacttcaatataacaaacaaaaataaagattatacttcattatatggccataaaggatgctatggcctaactgggataggaaacccttaactgagaaaacctgtcggcttagatctgtatgaattcaaggtggagacttgattttataaagcacaagcttaactgtaaaaatgaactctatgtattctcttgcagtcatgtccactgataatcaagattagttaagacacaaccagctgggtgcagcagctcatgcctgtaatcccagcactttgggagactgaagcaggagggctgcttgagcctaagagtttgagaccagcctgggcaacacagggagaccccatctctacaaaataaaaaaaaaattgctgggtatggtgggccatgcctgtggtcccagctactcaggaggctgaggtgggaggattgcttgagcctggggggttgaggctgcagtgagccatgttcatgctactgcactccagcctggatgacagagtgagactctgtctcaaaaaacacaaaaccaaaccagacacaacctctctggtggtcccaagaagaaaattctaattggaatcctctagaaattgggcctattttaagtttttactgaccaaatacagttcgcttcataattaggatgtaagatcacaaaatacatatatgttactataaagcaatgaacaaatagaaactagaagaaaatgagatatcaaattaattaaaattaaaatgtatagaagatggtgatgtataaaaaggctagaactgattagtcttagattgactttcggttaaaccttacccagaagctggcacacactcatacctgtgcccccacccattcacacgcatagctaaatctatctacaaagtccacaactttttccaacttgacagtgtaagtgctaagaagagaagacaaaaggagaataccttatcataaaaagctaatgaagaagggagaataggatttaaagctattttgagtcaataaaataaattctataaatataatttgtttaaacattcagcacttaaaacattaccctcagaaattaagcatattttaccttttctagtaagtagttattgatatgcccaccaatagggtcacccttgaagtcaaagttgatatccatgtattttccaaacctgcttgagttgtcattacggttggttttggcatttccaaaagcttccaaaacacagttggacttaagcaacatattcttcactctttaacacagataaatgaaagtcattataaaaacttatagagactagaattttttaaaaactggattttgctaaaccacatacaaatatttatacaaagatgctaactccagcactgtttgcaatatcaaaaaaaaaacaaacaaattaatgtccaccaatagggataaaaataaatttttgtttcccaatataatgaaatactatacaggtgctaaaaagaatgaggtacatcaatatgtactcacatggaaatgtccagcatatattaatgaatataaaatcaagttgtcaaataacatgcattgcaggatccttgtgtgtgtatgtgtatgttcacgtgtgtgtgtgtgtgcatacacatgtatcagcaaatgcttaaaaatctggagggatcagcacaccttactatggttatctagacaggagactgatggaatgggcaaggtaggatttcagggaacttttacatcttcaacttaattctgtaatttttgtttttcattttataaatgtacatattttatctacataaagaaaatttttaaaaagatgtgttctgaaaagggaaagaataggtgatacagaaaatgatacaatttttaaggcacttgcttataaaacctggaattgtgacattttattgtacttagttatacatcataaatttaatcttcactagttcagaaattgctcattattttctttgaagctgtatggaatttctcctttgtaccagccatttaatgcattctttattcgacgaatgctaactttctatacagcagtccctcccaatggatacattttaaacttcatgctatatccttgttttcattccactgataaaattcttcttatacaggcatacctgcagaaataactttggcctctgaaataacttgatgtagaagatctactgttactcccgctaatactggagagttcaaccttatcgcctcataaatgaaagcatattttaaaaatatgtgtgtggggggaaactgcttgtgataagatatgtttgtgaaagactagtaaatttatatatgccttactctactattgtaggtgtgaaattaatttatttctcatctagttgctctcctgagctcctaaggaaattaagaaaatttacacatatccctgtccttgtcaaactagattgtaaagtcagagtaagaaggagggatatgttacaattaagaaaaatgcctctcctggcccagcaatgcagcccaatatgatgaaaagaagaaaggctacgcagggtagtgaagtgtaagttctcttcttttacatcaacccaatatcctttcttcctatttataaaactgaagattgttatgtgtagatgaggtgggactctttactaaattagtactgagctttgaagtaaccaattaggaaaacagtttctctcttcaaaaaggctgcaccacataagaaagtgagtcttgttgctttatagctatcatccattcatcccttaagtatttgttaagcaaatactatgtgccagctgctcccctaaatgctgggccccagacagtagagatcagctttattactcatcttcccatgagcaatagcacagtatggcatgaaatccttttagaaaatgaatcctgttcggccgggcgcggtggcacatgcctgtaatcctagcactttgggagaccgaggcggacgggtcacgaggtcaggagatcgagaccacagtgaaaccccgtctctactaaaaacacaaaaaaattagccgggcgcagtggccggtgcctgtagtcccagctactcgggaagctgaggcaggagaatggcatgaacccgggaggcggagcttgcagtgagctgagatcgcgccactgcactccagcctgggccacagagcgagactccatctcaaaaaaagaaaaaaagaaaatgaatcttgttcagaaattccactgtcagtggattctgaatgttgtaatgatgatgatgggaaggcatgggtctgccttccagagtcccacttctctcagaacacagttttttaaaaaccctgatgtggtgcaaagagcaaggaacctgtgagagtttgaacaataaaacctaccagtgtaaattataacagctctgctgaccacatttaagtcaacagtaataaaccaggatgggaacactttcaactgtttcagagtaatgattcttttggtctcataattaggtaaagcttaccatagtattatttttctattaaaaacaaatctagaaatggatacagtgaaataaataaaagtacagagacaatatgcacttaagagaatcaaagtagcttaatcatcaaaaaatgctcagcccataggtttagacccccaaaatgctcaacccctagagtttaggtctagccaagtccatagagaaaacagagtgctaagaattcctccccattattagagtgctcttacctttcaacctctgctctctgactggggttggtgatggccgcaatatactgcataatgtacttactggcttccgttttaccagctccactttcccctggggggaaaaattgttcagggcttaacataataatttaaaccaagagtaagctaatttttaatagaataatttaaaaatctgatactggtgatgcatttaaaatcccacatgttgcactgtttcatttttttgcttttttgagttatttcgtcctgccttgatatggttagtggttctaacagacctgaatatgatgaagaaaataaaactattataaaactaaaataatgagtagactacaaataaagatttacttaggaaaaaggtactgatgtggtaaactaagactaaagttttagtacttggtagggactcataagtctagcagaaatgaaataaggtagtgagtcaaacagtggttacaactaaattcatataatcttattttctataagagaatttcttttaatcttaaaggggacaaaataattcgtctaaaaaattaaggttagagtaattttagtgaaaaaacaaaacagcaagctccagacacaaggtatcatagaaaaagcatgacaattgggataatgctgggggatggggaaaaaggaaccaattttgaagtatcttcgaaatgttaaatgcttatgccttctgactcaaaaattccactggtagaaatttctcctaaggaaatactaaaaaatactaacataaccaaataataataatgttcaaagcttttaaaacatttctatagactgtactgtaagtcatggctaaaatctggaaattatatatccatcagtagataactggataaattatgattcaattatttaaatggaatactatacaattattaaaaagaatgcactagctctatagaaacaccaatgaaaagatatttactatatattattaaatggaaaaattagttatataacagacataattctatatataattatatatttataatataattacacatgcaattatgactgtatttgtttgcacatccagagaaaatgtataaaaggataaacactaaactgttaacagctgttactgctggaattttgggaagaataaggcactcaaggcgaagaaacgttttgcttttactccacacactcatataattgtttttattctcccctttaaaacccagtaatactgtttttgtgatttgttttaaataaaacatagtcctaggatataattttctaactccaacactaagttacttaactcctctgacctttaatattcttatctataaagtagaaaaataactgttctacataccagagagttgttttgctcaccaaaatggaataatgattataaaagtgtttctaaaagcataaaaccaccagtgcaaatgtgaggtattattagcacctgaagaaattcccacaatttgggagaggccatcctgggtcagtgaacagatatttttcctgtccccatttcactacataagggtccttgaagggctccccttaacgtaggcagtttggctccagtcctcaaacatgtgaggtgtgtaccctatctcgtgcctatctccccccttgttgggcttcaataactcagcccctcagctctgaaagcttatttttggcccccacgcctcagtaggtccctcaacactagttcccaagcaccagtctgattttgagttgattcttccttttcacacctcaatatttcattttcgttggtttcattttgctatttaaaataattttgttacattttatccagacttttatgtgtttgagatggaaacattttccatgtcagctcaatctaacaaattggccagaagtcatccaagtgtaatatgtattcataaatgaaccaagattagaggatgatcagaaatgatataaataatttggtatttaacgttcatcacttttctctctcctatagaattgctcaggcttctacctttaaaaaaatatttaatcaattgtttggattcttgagtatcaaacaaattaaacacattgtgactttggaaatacaggggatcccctccaattacctgatatcacaatacaagtgtcttttgatcgcctcttcatagccttgtaagcagcatccgcaatagcaaaaaggtgaggcggtctctcatacagctcacggcctttatactgctcaattgtgtctcttccatagatgttcaacaacttgtaagggttcacagaaacgacgacttctccaatgaacgtatagatgcgccctttttcaaatctgtacagaagcaaaagaaaaggaagacgtagctgtggttacagagaaatgatgtatctgtcctgtgagtctcttatttccaaggaagtccaaatatcctaggaatgatttctgaactgacgtttcattggctctgagttaacttgtagagaatgtttgaggctgtgccccttcagatgccattggtagaaaagaccagtaggggttaaaagccaggcaagaaggaagaatttaacttgttggaggctgggatttcctgtttccaaaatacagaagggtaagaagatgaaaaagctaaaaagagttgaagacaatctcagagctctaggaggaaaagaaatagaagttaaagtagatcttgaaatccacttagtcagattttcaattttaaagaggactgtcatatacatttatttttttctccctcttgaacctcactaaaatgttagtaaattaatataaacagtaaaatccataacagagagaatggtggaggagacacttctgctctaaatcaaacttatttttttatgactgcctaaagttccatggtgtcgatatatcattatatattcaacgattcctgttccttcctgctttctatgaacaatactgcagaaaacactcttgatacataatcttacagattggtgcttttacttctgtggtatagattctcaggaatgggacagctggttgaaaggcatgtgtatttttaaagtatatataatatgattctaccttttccccataaaatagggttaaaaatctaatcatacgtatttgtatctgtacacagatatattttataaatgagtacataagtgtgaaaaaatatagacaaatacatgttatattttatgcatcattttatacacacagtagggttatgtggaaggagagaaataaagaggaaggccacatgggcaggtgagaagaggccacaggacaaaaaaaaaaaaaaaaatacaaagcttgagtaggtatgctatgactgcaattgtgcaactttatgtgtctatttaagaaaatttttaaatataaaattcagaaaacccatatatgtccactgtttttacacagtaatccacacatagaaacatatgtggcccagagcttagatgtttccacataacaagtggttaccaccaacatgctctaccagctgagagatactggtagacatctctctcacgtccaagaactgaacaaagggtgtgccctgacaggcaaaatgctggttcacagacagcatgtctctaagcacgcttgcttcatggctggtggagcaggagaaataactaagcatttgggaccaaaaagcaagaaccttaaatttcctttaagctggaatgaaggctgttggctataattaggaatggaaacaaacagatgttgataatttcaacaataaattcaaaccaagatttttatcaagtatttagagtattttaacagttattaactacttcaaggttttcagtgcatttttctactatgggttttctatgtatcctctcagttgttaggaagtttacatggcagctaaaagcactgatttcgagtcctttacatctgggtttgaatgctcacattgcaaactcaatagcagtgataccttgtgaaagctacttaacctccatgtgtttcagcttattcatctgtaaaatggtcataattatacccctctaccctcggacattgaataagtactttttaaaaaagatcattaatagtatgcttctgattatgttatgcataagggagatttttaaataacatttttgttttataaacattgctactgaaatcacaacaatccttacacatgaggaatgaatgaattcaattatcataatccaattctctggccagacgcagtggctcttgcctataatcccagcactctgggaggccaaggcaggtggattacttgagaccaggagtttgagaccagcctgggcaacatagtgaaactccatctctaccaaaaatacaaaattagctcggcgtggtggtgcacacttataatcctagctacttgggaggctgaggcgggaggatcggttgaacctgggaggcggaggttgcagtgaggcaagatcgcaccactgcactgcagcctgggcagcagagtgagactccatcttaaaaaaaaaaaaatccaattccctgactcagctgtcagtcaactacaagtcacaagcaaaatatctatataacaactgttcaaagactcgcgaaaataagctaagattcactacgcaagtttttctggcttaacctgcaaatttgcagtacatgctcaagtatctccaaggaaaagaatcaaaagggcacgattgtttagttttgaataagcactgtccaaacaaaaaaaaaaaatgaagaaaagcagcagaagaatgtctcatgagccgggaactctgcaactaagagtcacagcaaattatgtatgagattagactattttaagattccatgttggtccaatgatgtaccttctttttcactggataatttttagagccactaatagaccattatgctctaaaataatattttattacaaataaaatattttctattaacctataggcaccatgtataaaataattaaatggcttggcacagtggcacatgcttgcagacccagctatttgagatgctgaggcagaaggatcacttgagcccaggagtttgggtccagcctggacaacacagcaagatctcatgtcttaagaaaataattgaatgcataactattaactcaaagatagtggcaaatattaacagaatatgatattaaatacaatgcttcagcaattcacaaaacgttagaagctcattttacttgaaattctaagtttggttatcaaatacaaaactttcaatttggttgggtcttaaaaatcaccactaggtggtgccaatatacaccttaacagcaactcaaatttcagtttgcattggaaagccatagggtagtaagtaagcactaaagtaatatagtcgcttactctgtttgcctccaggaagaactactaattatcctagatgacaaataggatgttatcatctcttacaagagaccaaggaaggtgttcctatgacttctgtgtgcaaacctttcatgacaaacttttataattattcagtatctactttgtgccagataccgggtcaaaccctgggaattaaaaaaggagtggagaacaggaaagcattgtacataaataacaacaatatagtatgataggtaaggtaataaaagcatgtactgtagtgacaaagattatcccaataaaccaccttcagtgaggaacactaagagtaagagcatacagggtctggcctccgggtttctgttgacttccatctaccaacaacacttccacccaccaaaacctcccctaccacttctctctgtctctgttgctcttgttctcattaatgagctaattacagttcccaagagcgccatgtcttcatggttttgcccatggagttcattctgcctcacaccttttcctggttccttcttccccatgtgcttgccagattccctctccttctccaaaagtctaagcactaggtcctctatggagtcactcttaatactctacctccaacgtcagttttatggtctttgctctgttaccttttttttttcctttttagaacttcctaaatggttaacataaattaatagcaattgattttttaaactagtaagtttaaaaatatttattaaaagggacatatattttcactggcttttaagtgaaacaaagaggttctaaaaagttctgaattagtgagtagtaatggataaaatataaaggtataataatgacattggcaaacaatagttcactgtaaaggaattctgaaaccttttttttaaagtagccttgttaatttgcatgtgtcacttatatataggacaatctatagtaggaagtcaagatgagaggggctccttcagatcagtcacaggcagactacatgcacaaccccacagaaaaggaagatactgtggggaggggtggggtatggagaaccggaaggtggttggcccagtcagagtagaaggctgtgttaaggaatgctggggaacagttggaaatgtacatgggggtcagatttgatatgatatgaaaaccaggcttagggagtttacatttgagggagtttacatttgatgtgactggaaacaaggaatcagtgaagacttttctagttaaagacatcaataaggtgctcagtggggggaatggtaggagaaatgaggaaaggaaaattggagttgtttcacggggaaactggacagaatcttaaaacctactgaacataagggacaaaaatatatttgagttaggcagaagagaaaaaggaatttatttcagatgaccatatctcaaatgtactcctgaagcgtctaagttagattcacccactaacagaattcagtgttatccttggttgacttcttgaaatatatggaaccaattataatcaggaagaaaattctctgtgaatggtctactaggtatggtattaacaaaaccttattcgtaagtattattcatttacttgaggaggaacgtacactttctgaataggtgttgcttaatcacactgatttggcctgtcttccttcctttttgaatttaaatggaatcttaagttaccatgaacgttcctatttctcaggagaggtgtccatctacccatgccattttttttggcctttcactatctccttagacaactccaatttaggttccactcctgcacttcaataaaccttgaccaaacttcccaaactgctaaattcactggttggttttctatgctcatcttacttaatttctcagtatttgacactgactcccatttcctcaacacactcttctattggcttctttgagccacgttctcttcattttccttctgcttctctggttttccttctcagtctcctttgctgactcctctttttctgctgatctctaaatattccagttctctagggttgagtctagtatcacttcaaataccattcaagggtcttccatttaaggaggataaagtaatgatatcttggccccctttctaccctcagaaaatcaacaagaataacaaaaacagaaaaagacatcgcctacaatgaaacaaaaaactagccacaactctgaaccacaatctaggaagaaagattgtgaaaagctatgaaaactagacctagttgaggcaggttgctaagactgaatatatgcctctccaaatctccggcactggagtagagttctccagaagtaggttgcagttcctgagtagccaaaccaaaagtcttgctaagaatgtcagggtctcagtatgcaggtggctttggaacaaaataagtcccatttgacacttctaagtatatgtaaggtgaggttaaatgaagaagtaactagaaattcctttttttaaaaaaaaacaggctgtcatagtggtgaggcaaaagagaaaaagtgcagtggctctgcagcagatgatcttgataaatgaaaagaggcaatgctaaatcacctcccagaagtctcagacatacatagggaacttgctttctagttaggcaatcttcttgccatttcagggcagacagttggtgagacagggaatgagcagcagaccaccaaactcagtgcattttatctttcaacccagaatgaaccatacctactcaaagatgacaatcattaggccgggcgcactggctcacgcctggaaccctagcattttgggaggctgaggtgagtggatcacctgaggtcaggagtttgagaccagcctggccaacatggcgaaacgccggctctactaaaaatacaaaaattagctgggagtggtggcgcatacctgtaatcccaactacttgggaggctgaggcaggagaatctcttgaacccagggggcagaggttgcagtgagctgagatcgcgccacttcactccagcctgggtgaaagagcaaaactccgtcaaaaaagaaaaaagacggtcagttgaagtgaaccagaatggggcacatgataagatgtcagaagaaaagaaaaaaaaagtaggtagtgggtaaaacatctgacaggcaaaaggcagaccaagaataccccactcccccaaagaaaaccacaaagtagaaaaattatgaaagaacattctgtatgaaagcaaagaatacaaaaaaaaatgtagctctctaaaataagatatcaaagaaggcatcatttaaaaggagaaattgtgtttaaaatcattttttcaagagataaaaagctagaagagctcaagaaaaaaaccagaagagagaaaaaaaatccacagtaataaaggtcatattaaaagacataaagagaatggacactgctgaaaatagaaggagacaggaagaaaaggtggagaaaagtaagcaaaataattttttgtattatctcatttatatgtaaaatcttaaattttttttacctcaatagtttttgtggaacaggtgggttttgtttacatgggtaagttctttaggggtgatttccaagattttggtacacttgtcacccaagcagcagtgtacaccgtaccaggtatgtactcttttttttttttttgagacggagtctcactttgtcgcccaggctggagtgcagtggcatgatcttggctcactgcaacctccacctcctgggttcaagcgattctcctgcctcaacctcccaagtagctgggactacaggcgcccaccaccacgcctggctaatttttatatttttagtagagacagggtttcactatgttggccaggatggtctcaatatcttgacctcgtgatctgccagcctcagcctcccaaagtgctggaattacaggcgtgagccacggtgccaggcctggtatgtggtcttttattcctcgcccacctccctccctttcccctcaagttcccgaagtccattatatcattcttgtgcctttgcatcctcatagcttagctcccacttacaaatgagaacatatgatatttggctttccattcctgagttacttcacttagaataatggcctccagctccattcaagttgttacaaaagacattattttgttcctttttatggccgagtagtattccatggtgtatctataccacattttctttatccactcattggttcatgggcatttaggttggtttcatatttttgcaattgcaaattgtactgctataaacgtgtgtgtgtgtgtgtgtctgtttcacttaatgacctcttttcctttgggtagatacccagtagtgggattactgaatcaaatggtaattctccatcctgtcgttgtactggtgagtttacattctcactagcagtgtaaaagtgttccctttttcaccatagctacgccaatatctgttatttttttattttttactctgctgattatttcttttgctgtgcagaagctttttagtttaagtaggtcccatctatttattttttgttgcatttgcttttggggtcttagtcatgaattcgttgcccaagccaatgtctagaagagtttttctatgttatcttctataatttttatgctttcaggtcttagatttaagtctttgatccatcttgagttgatttttgcataaggacccagtttcattcttctacatgtggcttgccagttttcccagcaccatttactgaatagggtgtcttttccccagttgtcaaaaatcagttggctgtactcgactttatttctgggttatctgttctgttccattggtctacatgcctatttttatagcagtaccatgctgttttggtaactatagccttacagtataatttgaagtcaggtaatgtcatgccttcagatttggtttttttgcttagtcttgctttgggggtgcaggctcttttttggtttcatatgaattttaggattttttttccagttctgtgaaaaatgataatggtattttgataggaattgcattaaatctatagattgctttgggcagtatggtcattttcacaacactgattcttcccattcataagcatgggatatgtttccatttgtttgtgccatctaatatttctttcacaagtgctttgtagttttccttgcaatctttcacctccttggttaagtatattcctaagtttttttgttttttgttttgttttgtttttttagctgttgtgaaagggactgagttcttgatttgattctctacttggccattgtcagtatatagcagtgctgctgatttgtgtacactgatttcatatcctgagactttactgaatttgtttatcagatctaggagcttttttgataaagggtcttaggggttttctaggtatatgatcagatctctggtgaacagcaacagttcaacttcctcttttccaatttggatgctctttctttctttctcttgtctgattgctctggccaggacttctagtactatgttgaatagaagtggtgaacgtgggcattcttgttttgttctagttctcacggggaatgctttcaacttttccccattcagtatgatgttggctgtgagtctgtcacagatgtgaggtatctgataatggtgacatttcaaaacagtaaataaatataccaacaataaacatcaataaacagtgttagaaaatgggctagtcacttggaaaaataaaaaacacacatcattactgtcataagttgaactgtattctcccaaaagatacactgaaatcctaacccctagtatctgtggatgtaaccttatctggaaatagggtttttgcaggtgaaatcaagttaggaggaggtcattagggtggacctgaaaccaataaaagagaaaaatgccccacgaagggagagacagggagaacactgtgcaatgacagaggcagagactagaagaagaatgcagccacaagtcaagccaagccaaggattgacgaccactgccagcagctaggaagagtccaggaagggtatctcccttgacggttttggggggtattgctctgctgacaccttgaatttggacttctagttttctgaactgtgagacaatacacttctttattttaagcccccctggtttgtggtaatttgttacagtaaccgtaggaataaaactagttatactaaaataaattcaataaaaatgtctcattcttccttacaaataaagaaatgtaaatcaaatcaacaataagatatgcttcttcacctatatagagcaagagttttgatagtgaacggtgttagcaaaaatatgcaacctcaggtatcttcactgtcacaggtatcatcttaactgatctgctcaaaccactctccatccgttccccatacagtagcaagtatgatcttaaaatataaatcttatcttactctgcattcctagccttaaatcttttcaatgggaaactttaatctcaagccaatctgacacacagacattggttcatctcatgccatctacctctgattactgtgtgcactggcctttattcatctaaattcccctatccccatcattccacacctgtttgtttcctaaatttcacacaagttccttatccatcaaaatttctctatcccccatcattccacacctgtatgtttcctttgtaataccggtcacaagttgttttttgtttacttgtttattgtctacctgcaaaggaatagaggacatatctatcttgttcatgttttatcttcagaacgatcttctctttatgtggacaacttcacacaatctagatacaaacagcaacttttattctagaaaaatacaattaaatggtatctactccaactcaacttctgagacagacttttcattgctggagaagaaggtcacagaatatatgggtctcaattggaattggaagaatcagtacaaactcatagtatatgcagggcaaagagagagaagagggagagaggaagaaataggtatgcacacacacacatttcctaactctgtccacttagagaaacagtaacaccagataaaggcctggaaataccatttttcttaactaaaaggactcagggctccttgaagaaaagcggattctatcactggaacagggaaagtacaaaatgagcttggactatcttgttgagccagaaagtaggaaacgcacatgtcaaaaggacacaggagcaagatgaatggactttcactgcacccatctgggaccacatgggcattaaaatcatgtcagtaatgagctgggcatggtggctcacacctgtaatcccagcactttgggagactgaggtgggtggatcacctgaagtcaggagtttgagaccagcctggccaacatggtgaaaccccatctctaccaaaaatacaaaaattaattgggcatggtggcacgtgcctgtaatctcagctactcgggaggctgaggcaggagaatcgcttgaaccgaggaggcagaggttgcagtgagccgagatcacactactgcattccagcctgggcagcagagcgagactccgtctcaaaaaaaaaaaaaaaaaaaaaaaaggatattgttgggacaactgataaaatctgaacatcagctatgaattagaaaccagaattgcgtcaaaattacactttctgattttcatcactgtattgtggttatgtaagagaagatccttgttcttaagaaacacaccctgaattatttaatgataggggcctgatgtctccaatttattctccaatggttacaaaaaataactacatacatatataaaaatatacaaagagaaattaagaagcaaatagagcaaaatgtaaacaactgataaagaacaaaagggggtttcttgtagtatcgtctaccttttttgtaaatttgaaattatatcaaaattagaagttgataataaaaatccaacttctaatcctctttatatagttaattaattaatttagaataggcaagatagactcttagtaaaagactcaaaagatgtaaatgaatacacagtgaaaagtgtttctctctcctctttcctataccttccctcctcagaggcaaccactgctgctggtttcctgtgaattcatttagaaacagtttagttgttgtttttgaatgaatggcaatttttttttctctaattaaaatgtttatcttggcaaaagtctcatgtaagtagatagagaaaagccgagttttttatggcttcatagtattccatttcatgggtgattatacaataatatatttaatcagtccctattggacatttagttttgttactatgaacaatgcaagtataaatacaatggtagctatttctttgtgcatatgtgtatgtatatctgtagaacgcacatctagaattcaaattattagttcaaaggatataagcaatttaaatttatgaattatattgccaaattagtctccaaagagactgtaccaatttaaacttctgcttataatgtatgagactttctgtttcatgggtgtgggtttttaaaccaacgatactggcctatttagaaaggacagagttttattttcaaaatacacaaaactttgacccctttctacacttatgcaatgttcattaggttactttcaataaggttcagcccaccttgccagttcttagatgagaatctctcccaagggtgaaagcatcttgtttctgcttctcttggcaaaaatcatggtttccatgtgatggagtcaattagttttatccccttgttagactgtgtgttcctgagatggacagggaccatatgttggaaagagtaggagctttattttatttttgtttttatttttctagagacagggtctcgttctgtcacttaggctacagtgcagtggtatgaccatagctcactgtaacttcaaactcctgggctcaagtggttcttctgcctcaggctccccaatagctgggactacaggtgtacaccaccatgcctggccaattttttgatttttctgtagagacaggttctctctatgctgtccaggctggtctggagctcctggccacaaatgatccccctaccttggtctccaattatgagctttagagtcatacagcactggagccctgggtttgaaccctggctctgccagttactgattgtgtgcatttataaacatctgagtaactagtaagtgtccatgtgccaggtactatgtcaagagcactcaagctgtcttaaaatgatttggaaaagatgctttgttttgaccttttgttaacacactgaagcctagaattgacaacttggaagagggcacttaagaagcaccaccacagtccaccagtgcagcactcaagctcttgacatagtacttggcacatggacacttactagttactagaagaataagacatagtattattgtactcaaaggcttatataaatagacaatgctatgcagtaagcacaacgatagagggtttaaaaactaggctttttttttttttttaaacttattcccttcttgttctcattctcctctgtctctcaatctctctctctgttccagaaaagatttaaggcaataacaaagatagaaagaatgtcatggaagcttagagaaggatacctaaaccagctttaggagtgggaggcttcaaagaagacttcctaaaaattgtattgcttgacatttgaattatttatgcaattatataatctccacatagacagttctaaccacttcttggtttacactttcttaaaatgatttggaaaaggatgctttattttgatcttttgttaacacactgaagcctagaattaacaacttggaagacagcacttaagaaccaccaccacagcccatcagtgcagcatatgggtattcccaggcccatcgatagcagaggaaagggtgtattgattaagaaggtggactctgggatctggctgcagtttagcactgactagctctatgatcacgtggaagctgtttaacctccctgtgcctcactttcttcaactgatatagtacctttccctcagaggattgttacaagaagtgagatactctgcataaagtgctcagcacactaattagtacatggtaacagcacaataataccaagtcgtatttttattatgagcaatagcagaagtcataagaatggcaggaaatatctttcttccacttgagacccattgttcagcatgcggcatcagtgctatgtttctgtttaacatcacagtgagggttacttctgctagcacagcgaacggtgatccagcttggcttcatgtttataaagcattcttctagcagttcatggggaccctctaaggccaaatgccttcagtaaaattgcttaggcttaccacaggacataagaactagttaggaccacaggtggtggattaaatgactgacgttgtgacttcatttcttggctttcttcttctggtgcaatatttcttcatttgagctgcacaaatggtagttaaccagaagatgtggtcaggagatgcctagatgaattatcttacctttcctctgcaatggaaaacaactgtttttgatatatacgtttttaggtgatgcttgctttttcaaaacacaattcttttatttattatggcatgcctaattttaaatgttattgatgtatttaattgtatttgtatccagttgtttattcaatcaatcattagttattagcactcatgttccaagcattgtgctgggagccacaagcagaagaataaacagcagactcatctccaccctaatgcaggcaatgataaggacagacactaaatggaggtccagggagagccaatagaatgcactgtactggtggagggaagcagcagtgtttgaggaatccagagcagggcatgtgactataccacagcagagagagcatagggagagaggtgtgggaggagggccagagcgcgcaaggccttagggcttgtggactttatccaagggtggagctttaagtattgatcacatttgcttttttgaaagcttccctttggctgcagggtgtaaggaattgagtgcctgctaatggaccaattaggaagcactacgctggtctcaggaaggaatgacgggttctctggttgggatggagcagtagagagacagagaagtagacaggctttaagagtagagatataatctattggagacggtaacttactgggtatgagaggcaagaaagaaggaagtgtcagggtaagtatctcacatgagctactgagcagaccgtgatgctccattaatgaggatagggacaggaggcaactgtgattcagacagactatgcaatctgtttgagacacctgagagacatccaagtgaagatgtttctcacacttctttctctcatagaattaaacccgatcccctgaacacaaagtgaacaacaccaaggatggcaaacacagatcatcagcagtggagagagcaagcagataaccacaccatcacggccagcaaacacggcaaggagaacacatacttcattgccccatttaaaagtggaaaaatattttaaagagacaggagatatctgggttctatttaaatttttttttttttttactaactgaattcatcataccaagttcctcagtgattcaaccttcctggtataatagaaacaaacacaatagcttcctcccataaaacgttaactactaaggtctcatgcaattcagttttttaaaaaatacaataaagaagctatacaatgtcagcacatgaataaatcaccatagcattatttagctatgaagtgcttgtaagattctccccggggcctgaaagcttaaggagatgaataactcctctcttctcaggcccagttccaaggtgcaacttggggcagcaacttgcgccagcaagacagcagaaggaggaagagagtccgcctgaagacaagtactcctaaagactgagaaagaggccatccgggtacaacatagcagttacgtcagactacgacacttcctgtttacaggagactataaaacctttgccccgtcctcacttggtgctgaggccattttaggcctcagcccgcctgcacccaggtgctcattaaaacagcatgttgcttcacaccacctcatgttgtctgttagcgcgctctcggggttcgaaccgatacaagacccttaacggtgctgagtgtccaataatgacaggcatgaagatttaaaccaaaacatgagaatgaaaattacctattaataatatgacactgattttctctttcaaccaacaataaacataatttatccaacatagggctcaatatttatatatttattccttttcatccattccatttagaaatgatttcccattatggtaacatttggctacttggcatacctagggaagtagttagctgcattttaccttaactggggagttagcttatttataaatcaacactgctcaggaaaatgaaggatacctggacctgatgtagaaaactctttagtaggcattgacaattatatgaattgataacaattatgcattttaaataatattaaaaaccatgtgaattacagtattaaacatacttttttttttgagactgtctcacagtgttgtctggactgcagagcagtggcatgatcgcagcctcactacaacctccacctcacaagcttaagtgatcctcccacctcagcttcctgagtagctgggactacaggcgcgggccaccacatccagctaatttttgtatttcttgtagagacggggtttttgccatgttgcccaagctgttctcgaactcctaagctcaagcaatctgctggcctcagccttccaaagtgttgggattacaggtgtgagccaccatgcccagccaaacatccttttaaaaaacaagtaaatcccacagatggctgaggactttaactaaatagaataaacttaagattctcatcccttcccactctcaaatttatactggtaggaagcctctctaccttacatggtactgaggtatttcactccatgggacgggtctctggacgacaggaaacctaaacagtatatcctgtcacttttaaataactatgcctaattcagaaaatgacataaaacttagtacactgcatcacttttgttgtttttttttttgagatggagtgtcgttctatcaccaggctagagtacagtggtgcgatctcagctcacttcaacctctgcctcccaggttcaagcgattcccctgcctcagcctcccaagtagctgggattacaggcatctgccaccacactcggctaattt[160 bp omitted]tatcccacttttcataacatgtgaagactgtgatgtatttaaagaaaggttttccaaggtgttattaaaaatcctcaggtacccagataggcagcttttgggcacaggctgggaggcacagtagtcccccttatccaaagtttcgcttttcgtggtttcagttatcttcggtcaaccatggcccaaaaacatgaagatatttcgagagaaacatcacattcatataacttttattacagtttattgttataattgttctattttattattgctgttaatctcttactgtgcctaaattaaaaattaaacgtcatcacatctatgtacatatagaaaaaaacagtatatatagtgttcagtataggtggtctcaggcatccactagatgtcttggagtgtatccctcacagataaggaggagctattgtagtcgtgacaagagacactgaagactttcacaggtggttaacgtcaagcgcatggattactttcatttcagcttactgtcacaaaactttttaaaattcaataaacagattcactctgacctaatattaactatgcatcaactctgtgcctagaattattttagatcttttccatgtatgttgctaattatacatttactaaatattaatagaaaatcttctaaagccctcttttgttgacatcatgtgcccagttacaggtaagaaagaaatacgtttatgccaatcatttaaccatcatctctacttggagaaatctgaattacaaagcacagctttcactgacctgggaaggagatctacttctactacagaatggattgcatgagtaggaaaaccggaaagtttcccagacgctcctaaagttattgtttgactattgtttttgttggggtgaattaatagccaacaaggaactgagcaaagtattttaaaatcagccaaaatatttattgaattaatgaagggccagacaccttgtctgctggctctccttggctttcctcgtcagaagtctgtaacatccataaggctgcatttcctcatggaaagcttttaatacttcctatattctgcactatccttatacttcctatatctggcattttcttttagcttaagtttacctttttttaaagaataatcttccttgtgtctaagatagcgtaagtggttacttcccttcccctgtccacagttaaggaggctcaatcactgcttcaacgttgggagtgtctggaggcacgtggaacttctacggtgctaatctggtaatactgtaactcttttgatgccaacagcccctaaatggaagctaagaatgtgagatggcatccccaagtgaaatatcaaaagctgctcactggggccatcaataatgtctgctcattttgggatagagtgattatggtaagggaaagggagctaaatttggaagggtgtaaagaagacctaaagtaggtgaaagacatcagctatggccactctgcaaagagttttcatctttaaatgatggttgagatatggcattttacagctttcttcctagattgtaatcaagtttcctaagacaatgtgaaccaaatttctttttatttatacttatttctagtatactgctgtggggctcaaaaaggtttttagtaagtaaggtaagagggaactggaactactaagagattcattattaaaatttctaagtattaaatgggtccacattcagaaacacaaatcaacacatgctaaagacaaacatgatttggataatctactactttgctttagccagccagtccttttccacttgtgaaaataaccaagtattttctatactcaggaataccagacatcaggaagtgaactaagagaataaaaatgtagtggcaaagaaaagagtcaaaaactaaaaacagatcaaatacatcaggaaatggaaaaaacaaataattttccctattttttagtccctgtagcagaaattaaatctcgtttattgctagatctaactgagagagaaatttgtgtaggtagattggttgccaatttaagacaaatagtatattttttaagtatcatcccaaccatgactgcattctgagcttcataagccattaagaaaatctttaattgttctaaaaaaatagctgtcctcaatctcttcaataaatggtgttaggaaaactggatattcatatatggaagaatgaaaatataactttatctcccctcttaaagaagaatcaattaaaaatggattaaaggcttaagcataagacctgaacctataaagctactagaagaaaacatgggaaaagctcaatgacactggtctgggcagtgatttcttggatataaccttaaaagcaaagagcaaaaccaaaaaaaaaaaagagcaaaaccagacaaatgggattgcatcaaactaaaaagttcctgcaccacaaaggaaacaattaatggagtaaagagacaacctacagattgggagaacatacctacaaattgtactttggaaaggggctaatatccataatatataagaaactcaaactactcaataataagaaaacaaataaactatctatttaaaaatgggcaaaggacttgaattgatatttctcaagacatacaagtgaccaatacatatgaaaaactgctcatctctaataataagagaaatgcaaattaaaaccaaaatgaggtatcacctcatacctgttagactggctattatcaaaaaaatgagataagaagtgttagagacgatgtggagaaaagggaacccttgtacactgtaggtggtattataaattatacagccattttggaagacagtatagagttcttcaaaaactgaaaacagaattaccttatgatccagcaatcccactactggatatatacatacccaaaggaattaaaatcactatgtcaaagatcagtctgcactctcaatcactgcaccattattcacaatagccaagatatagaaacaatctaagttttcatcaacagaggaatagatttttaaaatgcgaaatatatatatataaaacagaatactatttagcttttatttaaaaaaataggaaattctgtcatttttgataacatggatgaacctagaggacattatgctaagtagaataagccaggcagagagagacaaataccacatgaccacacttacatgtggaatctaaaaaagtcgaacttaatagaagtagagagtagatggtggctaccagaggctggagaccaggggaggattggatggggaactgggagatgctggtcaacatgtacgaagtttcagctagagaggaggaaaaagtcacagcagggtgactacagttaataataatgcattgcatattgaaaaatagctaaaggagctatttgtttttgtttttttttgtttttatttttgtttttccagaaacagggtcccactctgttgcccaggctggagtgcagtggcgtaatcatagttcactatagcttcaaactcctgggcttgagcaatcctcccacctcagcctcctgagtagctaggactacaggtgcgtgccacaacaccagctaatctaaaagagatgattttaactgtccttatcacaaagaaacgataaatatttcaggtgacagatatgctaattactctgattcgaccagtccacaatgtatacatgtatcaaacatcacactgtaccccataaatataattatttgtaaattaaaaataaaacaagaaaaaaaggaaagtgcctgtcctctagttcaatcttgctcatttaagcagtaagcagtttctctaagtgtctattaatatgacatttcaaaaaagtgaaagaaaaactaagcttatttataaataatattatttacaaatctttacttaaacaagtcttacatcttctgtgaataagatttgaaactaaataatgtgtgattgaataactaaaactactaatattcttattttaaaattccaggaaatactttgtctcaagattttgcttataattcgtctaagtttaaaaagtcaagggtttggccggcgtggccagtatatttggcagagacagggctgaggattcggctggatcactgggctggtggtggggccagggtaaggattccactggtgcagctgggttgtccagcaggggaggggtctaggaagtggcctgcatggcagggggagtggaaattggtgacatacaggaaaactgagaaaataagtatatatgttgaggataatgggagcccaggtttcttcctaccacagaaagaaattacaaatatgaaagagggaaggttaaaataaaccccatggtgttagattgaaatggtaaatatcaatatggtacctgtcaataaatagacaaagaaatagatgtagacacatgtatgtgtgtgtgtgcattccccaacccccttcctagctctgtttgtaagagcaatgacacaccaatggcaacaaccatatctaccacccagttcttgatttctaaatgctatactaaaggaaacggctgaatccataatggggacacaggaaatacaagatgaacctggactatctttatgagcagaaaataaggaagttctcacagaatgacagacatgtccaaaggatactgcagccagctgaaacggacctccactatccaaatctgggatagtttattgtggaaaataaggagaatcaattcagttgttgactatctgttctcagtcttggctgtgtggtatacagcttgtaccctgaccagccttctaggagacacataccattgattacaagggagaacagaccaatgggaatgaactggcacaaattcatcaccacaaatgaacaaacagctcaagtctgtgctcttctgacagtatgatcatttgtttaaagtacctaatatgtagatgcctacacatcaccacatatgtatatattttgctaataagcttcctctttggacacagagaagcaacgcgtttatttatgctttgagtactttattatgtcaaggtactaacagtttggatgcagagacaaatagtttcaattgctaatgcattaaaaacattttttctaagttttatttttaatatcagctaaagaaaaaaatttttttctgggaaataacttgtaaaacatggtatcaattaagttggtcttaaattttccctttctcaaattctgactaatctgactaatctgacaaagattaatcacttagggaagaaaaatatttttcactgttaaaaatctgtggttaagagttagtttgacttttaaaaataattttcacattgaaacaatttcaaacttaaaagttgtaagaagaccattaaaaactcctaaatttcattcagatgaatgcccaattgttaatgttttcaaatttgtcttattctcatatacatgtatgtgtgtatgtagacctataacatatatatacatacagataaatttcacttgtttatacagattataataatctatttctgtgatcaaccaactaattttaaacacagaatgatacatgattttgttcttcaaatgatgcttcatcaagttaggaaaggtacctgctggtctaaaaaagctggaggtttcattttgtcttggttttagatttggtggccaaatcgcactattacacactagtccagtagccaaactgtctatggaagttaggcaggcaaagataagtggaaaaggaaagaagtcagtcaaacagggcatggtgagggctgtgagaagcatgagccctgtataaagtaagcagctgttaactctagcagacagttcccattctgaaatgtgaaccaagttgtgccagaacttccaatttttctttctttttttttgagacagaatcttactctgtcgcccaggcttgagtgcagtggcgtgatctcggctcactgcaggctccgcctcccaggttcacgccattctcctgcctcagcctcccgagtagctgggactacaggtgcccgccac[131 bp omitted]caccacgccgggcccagaacttccaatttttcaagaaaagctggaaatatgtattttaaaaggatgttatcctattttaaaaccaaactaatgtttacaaatcatgaaattggtttgggaaaaaaatcatctatagcttatatacatcgcactatcagctgacaggtgtaataatcattcccagttaatttctggtcatgactaatctgaaagttctaacaacataaataggcaatacacactttgcaaaacaatgaaaaaataatgaccctaaccccaaggatcctgcagtcaattctcttgcgaaggaagtgatgcaatataaactacactcttgctggcaaggattgattccatattacaaaacaacatctgcaaagcagagcttttaaaggaatcttacagagtagtcccacttataaagaatctaatccaaacacagtaattaccaggaaatttgtaatgattcaagagaacaaagacttttgtttttaaattttgtaaattgttttaaaaaagaagacaagcaaggaagttccctttgcattcaaaggctgaatggaagatttatctagtaatactagtatttatatgcagtcatcccttgataccagcagagggttggttccaggacctcttgtggatagcagaattcttggatgctcaagttcctgacataaaatggcatagtattcgcatataacctatgcacatcctcctgtatactttaaatcatctccagatacttataatgcccaatactatgcaaacacgatgtaaacagttgttatactatattttgggggaatgatgacccaaaaaagtctgtacatgttcagtacagatgtagatttccaaatactttctattagcagttgattgaatccacagatgcaggacacatagatatagagggctctaatagtatgactaacactaactagtatgactagggtttactttggagtttacaggaatatactaaaattattaataaaacttatgcaatttttatttttaaatattgtcctttaagaactatttgaagacccaccatctccataaggcttttcttgacacctctagcctggagtgatctttctccctccactggactttcaggacaattactgtctctacaatttatttgccaattaattggatgttgcactggggcatctcatctattacccttttaagcaattaaatgtttcactgctatctagtattttaaatgcttctacatttgtttatattctctaatagttcctagaacagtgttatttcaagggttccagtctgcaaactgtctgttgcttggtctgtgataagtaaggaaataaagagtttagtaacttttacgacaatttgacattacagtggcagccaagagcaagattagtggactcattttattcaataaagtatagagcagtctggatgctatcaaactcacatggtgaggttgcatgatgaggtcctgtatgatacaagctggattggtcacacacagtctgaccatgttacaaagtgtcatatttaagggtattatacaaactcttaactcaaaatattatttgcactgtattaagaggtagggcctttgggaggtgattagattataagggttctacccccatgaatagaattagtgctcttataaaaatggcttgagggagcttgcttgccccttctgtcatgtaaggacacagcaaaaaggcaccagctatgacgaatggatcccaacagacaccaaatctgctatcaatatcttgatcttggactttccaaattccagaactgtgagcaatacatttctgttgcttataagttgctgagtttaaggtattttggtatagcagcccaaacaaactaagacattagggaaataaaaagtacattatttatttttaatcctaatttggtttcacgcctaatcctttgcaaaataagctttatggactcctttgtctccaaaatacatgtattttctgagtgtacagtcattgcaaaccaaattatggtgaaggaagcaggttcagagaaatgaagaccaaaagagattgtactagctgttacttggaggtgtgatttcctcacatattgagtttggttttgaagccaaaaccgatggagaagtgtgttatttgcagagatgactaatgaagcaatcaaaccatcaaaattagacagcatttatatataaaacaaacattacttcaaggccaaaataattctctgaaaaaaaaaaatgatagctttaaaagctgatgtttacaggatagtctaaccctgatcaaggcagctcattcaggttgggctggttcaaagaagcactgctcttggatctgaattctggaagagctttttcaaagattacgtgttccttcctagagttactccctgatagacataggacctcaagccacatctttagggcttttcaccatctttattctcaggttatctgcaacttcaacgaataaactgccttctggggtttgat[137 bp omitted]ggtgaaaccctgtctctaccaaaaatacaaaaaaattagccagaagtggtggcacacgcctgtggttccagctactcgggaggttgagcagaagaatcacttgaactcaggaggcggaggttgcagtgagccaagatcacgccactgcactccagtctgggtgacagagcgagactctgtctcaaaaacaaacaaacaaaaacaaaaaaaagtaaccttatcacaccatacctaaggtgttatgttgtttgtttttcaattagagtttaaatttattttttaaatgtatatttaatatgtatcccatttgtaaattagaatgtttagctttgtagaaatagtcattaatctgtgaaaagtgaatcttcagccttaacttcccgggctcaagtgattctctcacctcagcctcctaagtagctggggactacaggtgcatgccagcacgcccagctgatcttttaaatttttaaaaaattttcactagagacaaggtctcactatgttacccagactggccttgaactcctgagctgaaacaatcctcctgcctcagcctcccgaagtgcaggtattacaggtataagccaccatgaatggccaaacctccacattttgaatatctaaagagattaataataaatcttccgagtaaggattatgtcatctgttactatgtttttatagctccaagggtgtttggctttccaaggtgttgctagtctgttccttgcttgttcaccatgaatgaattacttatttctttgcctgccctttagttccagcatattcaggaaaggagtggtgcagagtcaacagtgaatggcatttcctattttacaaaactggcaacacgtaagccttaactaaataacataggatgtataaataaaaatgtaggtgaatttggcaattctctttggtctatacatattatatacacacataaataggctataagttaatttcacttaaggtgaaataacagttgcacaactcagatttctcaaacttgaatttattttcatggaggatttcacaaagtcaatttaaaccagattggaaaaaaatcacaaaaattaatacacaataatcctactattttaatatgtatgaataaaaggtaaagactatactatagtgtttaaagcagtttaaacactttattacagtaaaaattacagtaaaaatatttaaacagggtaaccttagttccactctctagaggttcctattgttaacttatatattcttccataaaactttatgttcctataccctatgtatatacatatttaaaacaaaattatatataatatgtaaaatatacactgtatcttacgtgtcatattaatatatcttgtctgtatgtgatatatatcatataatctgatctacatgtttttctcaattaggatgtcttaaatactaaaggtaacattagcagtaaatagtaaagcaggcttatatcccaaacatttcatctgttctcccacacttctgcgggagttaggcaaggccatgctattagctctgcccggcaggctgtgggatacacacacacttctgggccaaagcacagaaaagctggtgtgcacatgctttggtgactgaggaacctctgtgtttgagatggcagagccacaagatcaaagcagcttgcgtgctcagggattgcctggagagtcccctggattgacagaaaagtttatgtgactgagaaataagccttcttacattaaagccactgagactttggggttgtttgtaactctagcataacctaccctatcttaatcagcaaccctttcacattaccatatttgcatacctcattttcctaaataacagcatagatatgttataattgagatgtcagcccctactgatgtacttttaggttgctcctgcttttgtggttgctattgttactataaacaatgttatcattaacatcaccttacccacaattttcctaacccaaacaagcatttctgtgggggaaaatttcttcaagtgagaactgatgggtcatagaatactaaatttgatgttttggaaggccaaggtgggaggactgtttgaggtcaggagttcaagatcagcctgggcaacatagtaaaaccttgtctccgcaaaaaaatttaaaaattacccaggcatggtggtgcatgcctgtggtcctagttactcagggggctgaggcaggaggattgcttgagcccaggagtacgaggctgcagtgagatatgatcatgccactgcactccagcttggatgagagcctgtctctttaaaaaaaaaaaaaaaagtaaatttgaaagaaatatttaagtaatacgtcaataatcagaattcaaaagatataaaaggaatgcagtaaaagttttccctcacagcttatcccagaacttccagtgcttttatccgactataaccaatgctatcgatttctaatgtattctgagcactatgaatggaatatttgtgtcccaccccctgccacgccaaaattcatacattgaaatctaactcctaatgtgatggtatttggagagggggcctttggggttaaccaggtcatcaagggtagagccctcatgaatgagactagtgcccttacaggaagaggccacagagctaacatactctttttccaccatgtaataatacaatgagagggtggcagtctgcaacccagcagaggtcactcacaaaaactcaactatgtcagcaccctaatattggacttcctggcctccagaactgtcagaaataaatttctgccatttataagctacctactttatgatattttgttagagcagcctgaaagactaagacattgagaaattttgtatgcaaattttatgcctttaggtatagccatacgtatatatgtaaacatgtgtacgtatacgtacatataaatacacacatgcacacacatatgtatatttagggtagatttgagagatatttctaaattgtatctcaaagaaaatgcctgctctcccacaccccctcctagggctgtttttattcatttttgtttttgataaaaaaaaaaaaaaaaactgtcacccatcctggagtgcagttgtgcaatcataagctcactgcagccccaaattcctgagctcaagcaatcatcccacctcagcctcctgagctgctaagactacaggcatgtgtcaccacacccaactaaatttttttgttttttattctatagacatgggggtcttgttatgttgcccaggctggtcttgcactcctggcctcaagcaatcttccccacttggccttccaaagtgttggaattacaggcatgagccactgtatctggcctaggcctttttttttttttttttctttttctgagacagagtcttgctctgttgcccaggctggagggcagtggcgtgttcttggctcactgcagcctccacttgctgggttcacacgattctcacacctcagcttcccatatagctgggattacaggcatgtgccactatgcctggctgatttttgtatttttggtagagacagggttttaccatgttggccaagctggtctcaaactcctggcctcaattaatctgcctgtcttggcctcccaaagtgctgggattataggtgtaagccactgtgcccagccattgggctgtttttaaaataaggggcactcatgcagagtttctgtgctcagcaataatagcaactgctaatacttggacaggccttttgcatcatcttattagaaggggtccaactataattgtcaggtgagctaataatctatacagtatttgcagtacaaattcacaatgatcaatgatctgcttctctaaagacaggcaaaaactaattaatgcttcctctatacctaaaggcagtgggaaagggctaagtaaagggtgaagggaaaaggccaggacaaagcaaaagcagtggcatgcaggtgaccttgacaggcatgagcaggaagcagccaggagaatgatgtggctgaaaggtgtacatgaacactggggagaagtggcaaaggggaggaagtagtgggtagccagagccaggaaccaatgtgacaagggactatatatgaagggtgaggaagctgcagagaagagcacccagacagcagacagggaggctgagaaagggaggagagagtaggtggcaagagaaacagaagcgcagatacaaagagttctaagggtgaccctgaagttcagagttcacagactcagaaaaggtacagatggttgggtgtcctgtgtcagaatgtgctggaggatttcccctggtaatttaggtctaaatagcaaatgattgaaaattcctgatct[134 bp omitted]gcctcctgggttcaaggattctccagcctcagcctcccaagtagctgggattacaggcacccaccaccatgctcggctaatttttatatttttagtagagacggggtttcaccatgttggccaggctggtttcgaactcctgacctcaagtgatctgcctgcctcggcctcccacagtgctgggattacaggcgtgagaaatctaacttttaatatgcctttaaataactctgtccacttatcacaatttcctcggcttaggataaatctattctgtttgaggagttgtctttttttttggtaatttaatatttatgagtcttttaaaaagtagattaaattatctggccttttaaattctgaattaattttaatgggtttaggttatttgccttatggcattacactgaaaccttggcagacagacagcaattgtagcaacggcttcaccaaaagtgagtgtattccttaagaagagagggagaaggctatcagcctgagaggcaccaaaggatgaggaagacttgaaaaagactgggagacaccatcaataatgaagaaaagaggaaggagcagtttctgctctcaaaagggcatctacatttccagttcagacatttcttccaactgcctataggatatttcaactaggatgtctcactaggcatcccagactcaatgcatttaaaacataactcaagtaaacctctaccagtcaaacctactcatcctgttgtcttcctcatctccatgaatggctatccacttagccaaaaagaaactggaagtcaagtgaggcctttcttcccctccctatgtccagtcaatgaggatgcatgctgcatctcccaaatccatccccgctactccagccccaatccttggtctgagttgattttctacagtacttactacctagttttccctaacttcaatgtgactactaattcttcttcatttttatatcttttacttctaatcatgaaatatttcaaaccttgtagtagacactgtatgccctctagccacatttatctcccaaccctcaccctcttttttttttttttttttttttttttgccaggagggctctgatgctgctcaggtgttcatccctcaccaagccatgtgttccagaaatggaatgctatccccagctccaagagaatggatcttggttagtctaaggtaaagctgggaattccagtcctcttgtcattgatgagattaggaagcttttcttggatctgagtaaagatgtggggcaatcctttttgaaagctgtcatatgcacgtgttgcctgagttttcatcttgagttgaggagagccagtctaaaaggacaagtcaaaatgctgaggaaatggaaggcacctgggtccttgaaaacataactgagcaactgaattatccaacccaggacccattctactactacacttcttgttatgggagagaaataactttccttgtagtttgtcacttttatttgggtttttctattactacttgtagccaacacattctgctataaaaagagataagcttgccttaatagggaagttgataagtttagttttgaattctgagtttgagtttacttttccaaatggaaacaagatcaaaggatggatgagaggacaggagtgcagaaattcaagaattggtacagaagggatattgagggctacacagaagtggctgaagtcatcaggtatgattatgactcaaaatggcaaacaattattcagtgttttttatgtgctaggcacaatttcaaatgtactacaagaattatctcttttattctcacagttctaagagtttctcttcctattttacatatggtaaaaaatgaggacaagagaggtctagtaacttgcaaaaggttacaaaggtcaggggtgatagagccacagttcaaacccagcagtctgacagcagagtaaatgctcttaactctttatgttgtgttacctacacttaagttagaggaagtcaggatgaaacatgagagtaataagccttccaagtgagggaactggagagacaagtagagtaccaggtcaagggaaggagtactgaccttgagatatagcctgtggggttctgggtaggacaacggagaggactgcagaagttccagcagacactgggcaccaacttcacctgctgcacagttttgcttagaaacagcagcatgttataacacattcagcttccttgccttaacaaagcactaagtcacttacaaataggaaaataatatttattgagtacctacaaaatgccaagcactagactaggtagagactttatatgtataggccatttaattctcacaatcaccttaaccataatggcgacattaacttttcatgaacaattttgccaagcaaatataacttatacacatggagtcatccacacccatcatccaatccattggcaaatcttgttagttcaatcttcaacaactatccagcattcaatcatttctcctataaacggtcttcactgatgatttcccaatatgtgaaaagatactctggcactgacttcagtctcttctttattatatcctcaaatatcactctacagacaagtctgaaaaaagactaggttcttacacaacctattactcattcatctaacaaatattttttgtgctaagcaatacgccaagggcttagatacaatggtgatcaacataactatggtctgtgttcctccagacagcccagtaggggatgcagacaagtaaaaggaaaatgtaacaaaggagctattagaggaaatgcagggagatatattacagtacaaatgaaaggcagttaacccagacctcaaggaccgagaaggtgatcccagaagtaacatctaagttgaaaactaaagaatgggtaggaattattgaggcgatggggtggaggaggaggagtgggaaagagtagtgtgccacatggagatctcagcaggaacagaggctgagaggcttcagaaagaaaaaagcatgtttaaaggatggaaagaagttcagtaagcctggagcacaaggcacagaaaggacagtaacagtaaaggaaaggaaaactagagaaaagagaggagaattaattgctgatgatgcaagggccttccaagtcatgttaagaagttctggctacagcatggaagtcttaagactggagctatggagaccagttaagagacagctgcgtccatgggatgcttgatagaaacctacactagagcatggtggtagtcacactcaaaagatatttaggagactcaattgacctcatctggtgattgatcagatgggagtggagatggtgaggacagacatgaatcaagaataactagatttctgccatgggcattaggtggaaggtttaatacaaactagctttcacatgttggtaactttctcgaggcagcaacactttttagaaaagtgacctgccagagttcaggtcagccatctaaaaaacacttcttgccaggagtggtggctcatgtctgtaatcccagcactctgggaggccgaggtgggcagatcatgaggtcaagagatcgagaccatcctggtcaacatggtaaaaccctgtctccactaaaattacaaaaaatagctgggtgtggtggtgtgcacctgtagtcccagctactcggaaggctgaggcaggagaatcacctgaacccgggaggcggaggttgcagtgagctgagatcccacaactgcactccagcctggcgacagagcaagactccgtctcaagaaaacaaaaacaaaaacaaaaaacacttctgtgttaacattctaaatttatcccttctttttttcctactgcacttataaataagagtaaatgctcaatgaatttgtaagcacagaaaccatataaatgaccttataaaacggtgtgagaggaagaaggataatgaagggcctccttaatcagagtagccatttgttggctgttaaaagaagagacatataatttggagtaatgaaagcaagagaaagaattagcagactgttttaaatgaaaacatgtctcttctaagcacgatgcattacaaataagacaaattaatcattgttgaaaatttaaatattcacactggaattgctgtatcatctattagaagttgcctagaataatgctaattgcaattacagataaactccaaactttcagtggctttacacaagaagttgatttattacccatacattagtccaatacaaacgtttctgtggggagggagtaggcctttgctccatgcaactgttcagtgacatgtccgacaaaaacgcttccatcttcaacacatgacttcaagttacgctgcgcatcaacagccagccaacaaaagtggcagagaatggagaatcacttgcgggaggcttttatgagttagacctagaagtgtctagacctcagaaattccaccaatgagtactctgtcacatgacacgtaactgcaagggaggatgtgcctccaaagaacaggaaacacattttgctgaataattagcagtctgttatggatggtaaaatactgaagacaagatatatgacttactcacctttgcagagcttaacaatatcttgaagaaaataggcgctcaaggctcaaatataattctgttgaaaaaatacttaatgaaaaaattatctcataagagatccattttgctacataaactactgctaaaatacataaactgtaggaaaaaagattttccagctcttgacttatagaagttgcccatttcaacctggattttccttatttaccaggaagacaccaaaaatattgtggtagaagaaatcattccaaacttgtggctcaagaattgtgagaactatctctaaagtatggaaaaatatcaatgataatgacttaaatattttaaattttcatgttagttcttattctcttaacttttttaaaagcatagttattatgcttaagtccaatcctggtcaggcagccctcttccctctcgtagatttgccaatgagaacaggaggcctaaagagcacacgctttggcaaaagaaacaaacaagaaagcatgctggctctgaattcccttggcctcaaagtgacacatcactctgtgcagagttcattggccaataccacaggttagtcctgtggtccccacctaactgcaagctaggtaggaaatgttgagaaggacaaggtaagtgattaccgtctctgccacacctgtatagaccacaagccccagtttctaggtacattttcctatgtaaatttcggggttgtattctctcatacaaattagtttcttgtaagtttgtttactagtatcaataactgagaatcaagaggataaaattaaacttctgggcttataaacaaatcctttatccatggtaacctagtagcaactaactgatctgaaaaccagtgggaagtagccagttgattcttctcaatatctctcagctacaatatcctaaacaaggaatccattcatctatcagtcaataaatatttattgagaatgtctgtgggtctagtgtgatgtttaacactgcattaagcgtctgggagtgaaaagggcacatttggttcctgccctgatcaaacttagagtcaagtgaggaacacagttttaaaaaattatcaacaatcatattattacaatccagacaaacaagagatataggaagaggtcacagtgctaacactgtattaaacatgagacctgaccaggttaggaaaggcttcactgagacaaacgcagggcccagaaggatacataagggttaggcagctaaagagagaaggttaatgtcctagaccaagggaaaggttggaaacttagtccaatgttatttacttttcgtcttaaactttgaaatcattttaataattattttggtttctctccacctgattgctgtagtactattaaaactgaattttaaataattctgtttgattctaaacagtcaagtttgcaatagattgccatgttttaacaatatcttcaaattctaggcaagggaaaaaacatttgcatataatttttctctaaacatatttatactatgtatttacaattagtaaatcctgagttacttcattgtttttatattaagtggtctaaatctaataaatggatgcactcacctcaactgcagatattatgaaaaattcctggatgtagcataagtatgagtttaaaattcaacatcaaaaccttaatccattttcatcacacacacaggatttagtctttcttccaatataatacagtccctttttgaatttttttaaataataaaaaaattagtgtttttaactaaagaaaaagatgacaagcggtaagaaatgccacagaataaaaagtttttggtgaggaaaaattatgtaacttaggcaagtaactacttgtacctcaaatttctatttaatgaggtactagatgtattgctataaataaaataaaaatagtaattatctgctagctacttcacagtgatttttaaatttttttgtagatacagggtcatgatatgttgcccaggttggtcttgaactcctggcctcaagtgattctcccacctcggcctctcaaagtgttaggattataggcatgagccaccatgcctggctaacagtaatgttacaagaatacattagcaatctacaaattttatgcatttctaaaaagatatgaagactgaagactgaagactgaagcttctttatgttgctgagtaacaggaaaacaaccaccagattatttaatggtttagcaacaaaaaacttggaacaagaacatatttgtacctctcttaattacagtaataaaatgcatatacattctatgccttttgaaggtaatattttacactcataaaatgactgcagtttaaaaactggttttgtcagctaaacacaggagttaccattttcaaggaaagtaatccttcccagctataaaagcctatacatttatgacttgttttcagttcaaaaactcaaaattaaccaaaataaaaggatccagtagaggttgatgttcctctttctttgctttttctctaaactgttttcaagtagtatagtaatagccaacactcactgagcgttaccatgccaggcactgagctaagtggtttacgtgcattatcacatttaatcttcacaacaaccctatatggtatgcacttttaaagaaatatct[224 bp omitted]gaggc[138 bp omitted]agtattgtgaaagagttgagattcacctaagcagtctacttctagagccagtgcttttaaccacacctctatcctgcaaatagtctgtaaacaagtcttagtgatgcttctgttcaaactgtggatcgctgctgcccctgcagtctctgaccattcttcccagcaatgctgagctgtggtcccatgtgaaggcctcattatggaaggagggttggctaagtatccaatagtagctccagcccagtgggaaggtaccaccacttgagatgacactgcaacggaggcagatgctcgatggacacattcaagacccattcggctcaaggatcaaaaaaatggggcttgcaagttcccattcttcttttctagaagagctgctgagagagagaccaatgggggaaataaagtgaaagcctcactcttctctagcctaagttttagagtccagtgaagcattgcagcataggctttgtagtcagaaaaccctgagatcaaatcctggttctaccacttgctatagcgatcttgggcaaggggtcagatctctctaagcctgtttcctcatctgtaaggaagggtattatatcacataaggttactgtgaggactaaattagactaagtatgcaataggataccagggtccagttttctttggatgtaatgggcctggaaaattccttaaaatccttttcacctacaaaatcttatgaagttctgcctcattttctgcttaaaaactttaaaaaattaatagaaataaaagagaattctactagagagataggttgacgttacttcttccttgctttttccttaaagtggaatgttaaaaactaggatatgcctggaaagtgttctatctacaaaaaaggaagttagcagccgctgaaaagtaactacagatggctattcactttactctgaaagcatttgctgttgatataatcacaccacaggaaaacatcataatgttggctgaaagaaatctgaaatgacacagcaataatgcttcatcatgtagaagttggtttcaagtttttttttttttttcggtctggatagtgtgattgcaagaagggaggctatgctagcttggttataagcagggaagttggctgtgaggagataaacagagatctcacaggaattctggggtagaaatcactggaccggaactgaagggctatctcccagcttctgcttctgccttttcattcagtccattcccctccgtttactcaacagttccctctgctttggtggcagtttctgctccttctcaaggctgacttgcacatggctctgacttgctgtggcctcctctccatcattctctgcatcaggtgctttcaaccttgattttattgtttatatatacttatgaacttttctgcagggaatgtccatactttcatcagatgcttcaggaaagcaatgaccccaaaaaggaataaaaaccactgttctatctcatgacactctacctttagtttctactagtaactcttttagttattcagtttcttaattccaaattcctaccagaataataataatggctaccatttatgaagctttgagtatgagccagatactgttctaaggacttaactatttttaattctcaaaaccacattatataggatctaatattacagagaaggaaactgaggcatagtgaactttgggtaacctgcttaaggttacacaactagcaagtggctaagtcggaatttcaatctagacaacatgcatagtacttaaaactgactgagttaaactttgcaaatcaagccacaggttgttggtaagcccacaggttggtcatctttggattatgtctcattccagatgtggcaagagggagagacgggagacaggaatcaagtggttcaaaacatggtcactgttcagtaaggccatagaagggtagtttctcttttaaaaagtgagaacaaggatgcacagaaatgggaactcttgcacactgttggtgggaatgtaaactggtacagccattatggaaaacagtatgtaggttcctcaaaaaattaaaaatagagctaccatatgacccagcaatcccacttctgggtatatgttcaaaggaaagaaaatcaccatcttgaagacagatcttcaccccatgttcactgcagcatattcacattagtctcaagatacgaaagaatcaaagtgtctgttgacaaatggatggataaagaaaatgtgatatacacacatacacagaaaatggaatactattcagttttaaaaagcaaatcctgccatttgtgacatgaatgattaatgaacctggaggatattatgctaagtgaaataagccagacacagaaagacaaatactacatgatttcacttacaatatggaatctaaaaagttgaactcaaggaaaaagaaagaatggttgttatgaggtcataacctcatacaattatgaccatatgagggcatatatggtcaagggatggcggacatggagagatattggtcaaagggtagaaactttcagttatagaaaaatattctcaccataaacacacaaaagagtaactatataaggtgatgactacgttaattagcttgactgtggtaataattacacaatgtatacctatatcaaaacatcacattgtatactttaagtatatatattttttctgttcattcttcctactttttctttaacttttattttaagttaagggggtacatatgcaggtttgttatataggtaaacttttgtgttggaggtatgttgtacagattatttcatcactcaggtattaagccttgtacccattagttatttttcctgatcctctccctcctctcaccttccacccgctgataggcctcagtgtgtgttcccctctgtgtgtccatgtgttctcatcatttagctcccacttataagtaagagcatgcagtatttggttttctgttcctgtgttagtctgctaaggataatggcctccagctccatccatggccctgcaagggacatgatctcattcttttttatgactggatgcaagtatatataatttttgtttgtcaataaaacctccattaagctggggggaaaatgatgtaggtggtgggcaggaataattagtcattcatatctctaatataactatcactttcattgtttaacttgtgggaatattcttaaatcaacaaactaaaataaagaaatgaatgaatacatatgtacataaaatttaatttagttttaggaattacaaataaggatgaagtaatccttattgtagagaaataagagatggccaagtgccctacaactgccaacctttgtcagctgaagataagtaaatcacacatacacacacacacacacacacacacacatctttgactggaacttctctatggatccagggagatctagtcctatatttgaactgaatttccatggacagatctaaattcaaactaccaaattcaaactcgtccatactagggactggggggaaaagttttttcagggaaaaactccttttacttataagcataggatttttgttcaaaaagtgaaagaaagagacaaaatatgaatgcagggattaggttgtggacatcctttgggggtgatggtggggcataattctgccaaccacaggcagcattttaaaattagtggtttttaggaaacaataggtgctggagaggatgtggagaaataggaacacttttacactgttgatgggactgtaaactagttcaaccattgtggaagtcagtgtggccattcctcagggatctagaactagaaataccatttgacccagccatcccattactgggtatataccaaaaggattataaatcatgctgctataaagacacatgcacacatatgtttattgtggcactattcacaatagcaaagacttggaaccaacccaaatgtccaacaatgatagactggattaagaaaatgtggcacatatacatcatggaataccatgcagccataaaaaaggatgagttcatgtcctttgtagggacatggatgaagctggaaaccatcattctcagcaaactatcgcaaggacagaaaaccaaacaccgcatgttctcactcataggtgggaattgaacaatgagaacacttggacacaggaaggggaacatcacacactggggcctgttgtggggtagggggaggggggagggataacgcgtccagcgccgtccgtccgttcgtcttcctccctcccggcctctcccgccgaccacgggcagtggtggggggcggggggcgcgcgtccccggtcggcgcgccgcttcttcggttcccgcctcctccccgttcactgccggggcggctcgggacggggcccggggagcgtgggtgggaaccgcggaggcggccgcgccgagccgggcccgtggcccgccggcccccgtcccggggggtggccgcgcgggccccggtggggcggccacccggggttccggccctcgcgcgtccctcctcctctttcctccgcacgggtcgaccagcagaccgcgggtggcgggcagcaggcggcgaggcccggggcgtccccgcacccggccgacctccgctcgcgaccgctcctcagtcgggcctccggggtcgaccggctgccgcccgcgggcgtgagactcagccggcgtctcgcatacctaatgtaaatgacgagttaaggggtgcagcacaccaacatggcacatgtatacatatgtaacaaacctgcacgttgtgcacatgtaccctaaaacttaaagtataataaaaataaataaataaaattagtggttttaaccatgacttttacttggtctggtaaaattatcatggtaaatattcttgttttatttcccacattcaggaaggggtgatcatgtgacctagttctggacaatgagatgtaagttgagggtttctagtaaagttttgcttcctcagtataggcaccccttttcctcgttttctttctgtctagaatgctgatgagaggttggaggtggagtaactatcatatgaccacaagacaagcatgagcacaaaagtcacaagccaaggatagactgagtgagcacccagggtcagggcactgatgacactacgcagctacaagatcagcccaactactaacctctgcagcattcattttatatacatatatatataaaatattttacagagaaggaaactgaggcatagtgaactttgggtaacttgcctaaggttacacaactagcaagtggctaagtctgaatttcaatctagacaacatgcatatagtgcttaaaactgagttaaactttgcaaatcaagccactggttgttggtaagcccacaggttggtcatatatatccccaatttggcgaaatacacctaggaaaactgataatagtaatataagtaattaaaaattgagtgatcaaagggagagagggaatgtaaagttatagttataaaagtaactactaggaaaaaacctaattttagatgttcaaattatcaaaaggaaaacataaagccaggcaacacaaacactgaacatcatgcaaaaactatttaagaagtactaggctgggtacggtggctcatgcctgtaatcccagcactttgggaggctgaggcgggtggatcaagaggtcaggggatcgagaccatcctggctaacatggtgaaaccctgtctctactaaaaatataaaaaattagcggggcgtggtggtgggcacctgtagtcccggctactcaggaggctgaggcatgagaatggtgtgaacccgggaggtggagcttgcagtgagccgagatcaggccactgcattccagcctgggcgatagagcaagactccgtctcaaaaaaaaaaaaaaaaaagaagtactaaaggcagaaaaattacataaagtaaaacagaactgagaccaaacatatctgtcatgtcaataaattgtcatataaaaccattaaaagcaagactctcagaatgatcacaaagtagaatcaaattatatgctgaacacaagagattcatttggaacaaaacaaccctgaaagttggtaataattctcccaaaatttaacttataaattcaaagcaactgcactcaatagactaataaactttcatttaggaactcgaaaagttggctttaaagttcaatttttgcaaaataaagaacagtaaagagatatttgtcctttcacacagcaaagcatagcataatgggtcagctatcctagttatagtacccataaaactaacagcttactgtttgtccagagtttggggttctgtgccaggcacgtcccccaaatactttacacatagtatctcatttaatcctcacaaccctgttaaggagcaaataattacccctatttgacagatgacaaaattaggattgaagaagactgcattactgtctgaggtcccccggcttagtaagtgatggctcagaattgacccaggacctctttctttggagctggtgctctggtctaactttccatttctagtaaatagaaaacaaaccatatacagaacattattatggcatactctcattattatttaatttgaatgtatgtatgggtatgcacaatttctctcccttgccttctcccgctcttcctccctccctcctcttatagtagctggctgtccaaatgcttgcatgtcctggaaggagacacactaaactgcaatgtttacttttgtggagtagaattcgtggaggagaggaaagggaggaaatttcatgttttacttcatttacttctgattgtttgactgttacttgcatgtttttctttagtaatgaaaaaataaggataaaaaagtaagctaaattaaaagtgatgaaaatattaaagaatagcagcatatctttgttatctcaactgtggccttttgaaaatgtgatattagaaatagtcgttgagcttgtttgggtgtacaacattttcaaactgaaattaagtactactacaacaaaaatttccataatacattactttataaacacagggtatttattatttcaggatgatttttcatttctttttcttttttctttatcttattttattttatttttttgacacagtgttttgctccaatgtctaggctggagtacagtggtgtgatcacagctcactgcagccttaacttcccaggatcaaatgattctcccacctcagtctcctgaatagctgggactacaggtatgtgccaccacgcctggctaatttttgtatttttttgtaaaggcagggtttcaccatgttgcccaggctgatctcaaaatcttgggctcaggcgatccatccaccttcgcctctcaaattgctgggattacaggtgtgcaccactgcacccggcccaatttttctttaagcaaggtcacatgctcatatgcgcagagttttaaaactattgatagttttaattgatgggcatgacagaagtcgaatgctgcttccttaacagaatactcatttcacaagtgatatatgatattaaaatgctataaaaatgtttaccatagccaggtgtggtagctcatgcctctaatcccagcactctggaagacccaggcgggaagactgcttgagcccaggagttcaagaccagcccaggcaatatagcaagatctcatctctaccaaacatttaaaaaataagataaaaattagccaggtgctctggcacacgcttgtagtcccagttactgggaggctgaggcaggaggattgcctcagcccaggagtttgagcttgcagtgagctatgatggtgccactgcattccagcccgggtgatagagtgaaactccatcttaaaaaaaaaaaaaaaaaaaaagtgtattactactttattctgggggttaactattctagggagaatacacttcctgaagaattttgaggtattttagagatcttgatgatacattctcccttcctctccaactattggttagtttgccccatctcatttactctcaaagcattctgtacttccaccttcacataacttaaccatacaagtctaataaagacttgcctgttcacctacctgcaatcaacacctcccatccccacccatttagcagagcctggcatataggaagtcaacaaaagtttgttgatatgaatgaatgaatgtttttaaggcctatgtggaaaaaatacatagagatgcttttcttacagtagccagcttactaccttaaaaagaataggagcttaaatatttagttgcaaatgagtaaatcatggcttgaaaatttatttgtagaaaaatgtgcatcccttcagtaatttctatgttactaaaatctgaaatctaacaaaacttgacatttaataaaactgaatacaatgtaatttatacaggtgacaccacacaccaaaaatcctgccctgatatagaagaccgtggacactggatcttccacactcttgtgataggagaaaatttctatctgaatagaagacaaactagtactaatagcaaactaatttaatggacataaaaatatcttgagaaaatatttcagaagtgcaatatttggtaatgcatttatcatactgtttcataatttccagctaaattctgatacaatcatagttgaaaacatatacatatatatattttaaacttttaaaaaatgctatatcagtatattaggaaacatgggaatgtaaaatataaaacatgggaatgtatgttaggaaaaatggtgccaccaaatgtgaaagacagtatggtagttcctcaaaatattaaaaatagatttaccatatgatctagcattccattcctgggtatgcacccaaaagaattgaaagtagaggcctgaaatttatttgcacactaatgttcatggcagcattattcataatagccaaaaagtggaaacaccccagatgtccatcgatggatgaacggagaaacaaaatgtggtatgaacacacaatggaatattattcaggattaacaaggaaagacattctgacacatgctataacatggataaaccttgagaacattataataagtcatataataagttgtgactaagtcagtcacaaaaggacaaatattgtatgattccatttatatgaagtacctggaatgaaaaaattcatagaggcagaaagcataatggtggttaccagggttgtgaagagggaggaatgggagttatggtccaatgggtagagtttcagtttgagatgatgacaaagttctggaaatgggtagtggtgacagctgaacaacaatgtgaatgtacttaatgctacagaaatactgaactgtacacttaaaagtggctaaaatggtaattttatgttacatatattttactacaataaaaaaattaataagcattttgtaaaaaatgtttgtatttatttctctatttttaaaacctccaatcgattcaactgacatgaacaccccccaaaaaggaaagagtagaaaaaaagacatcattaagtttaaaggcaaactctagaatctacagcccacaaaacagatggtcagtgactatgtacacaaggaattgtcttttatgccaaagcaatgaggaaaaagtaaccttgaaaaaaaatccagctctcacttaagcagaaaaatattttcagaaatctgatttacaagtaaaatatgatgcttatcattacttataaactgcagttttcactaaagaaatagggataacattacaaagcattaagaaataactcttaccaagtcagaaccacaccaatggcaaaagcacatgatcacaaaccgctaaatattggacaaagaccaaaaccctgagcatgggagaggctgaaagcacaatgaaaaacacttcaagttaaggatgagtgaaagaagctgacgtggaagccagggatactaatggcaggcattattttccagaaaggtcctgggtaagaggtcattgttctgtgtaagtaaattggatt[221 bp omitted]gaggcaggagaatggcgtgaaccagggaggcggagcttgcagtgagcagagatcgcaccactgaactccagcctggacgacagagcgagactccgtctcaaaaaaaaaaaaaaaaaaaaaaaagaaagaagacaggaaacaggtgtgtacgtgaatgagtcaagcagagaatgagcaggctctggccaagtatgccaggttccaaatgttctctctaagctactacatgcagagagggagggagggaaaatgctatgtaagccagtgggcaaaatcaattatttcatattatttaaagaggtaaaaggggtagaaaagctaacctattttgaatgcctgcttcgtgctaagaggcaaggtggtgctagatatgcatttttctcatttaaacttcagagccactctatggtgttgtattctgttctatcagttctgttggtgccatactactatactatattcctgctatggaaacggaggcacacacatacaagtcgggtaaacctgcttaaagccacactattagtaagtgacagtcagaaggcagaccttgggtctgactccaatgctcaggacttaatcactgagctacactgcctcaattccacacagacaggagaaaataagttaggaacaaaaatggaaatgctagaaagaaaatatgctatggtgtgtgccaaagtaaactacaaaacatttgcttttaagatgaaatcttgaaatagtagcaaaaagagagtcatctaacagggaggagctaagaaagtattagaacaggggaactagatacttagattaagggcatttttgagtaaggtcttctcagggtgctttcatttacctccccaccttttgggacagatatttatcagaacatcagacaaagtcattttcaagtggtggataaaatgatttggctaaaagttattttatgcactttgaatttatacacatacctctggctttgcagccagacctgaggttgtaccctagttcaattactttctaggggtaggaacttgagtctcatgctgttcttttctgttttgtttttggagacagagtcttgctctgtcacccaggctggagcacagtggcgcaatctcagctcgctgcaacctgcacctcctgggttcaagctattctcatgcctcagcctcccaagtagctgggactacagaagtgtgccaccaagcgcagctaatttttttatatttcagtagagacagggtttt[131 bp omitted]tgagagagatacagaaactagagtacatgccttgtgggatttttgtgaagcagaaatgaaaagtccctagcatgagacctatcataaatcggtctctccaacccactcaccgctaatcaaataaacagacatctcttctatgaataatttaattcacatatcatcaaattttccaggtaactgaagcttagccctagagtcctgtctaaagctagagagaaaaagagctcccagaaaaggcatgagacagtcttcttatgaataaagttaactgattacaatatatattttagtttccattaaataaattttactttattctctttatctgtgctctggataactgaggtaaaccgagaaagtgataacatttaaatcaagatactcagcattagcacaaaattctccatctgatgaaaatatgtgggatgctcattttcgaatagtcaagtgcagtagtgagaagggggtaaagagtagaataaggagtttgatctgcaagtgactgaacaatcaactgagataactcactaccttcagaccagccacgatgctttaaatagcatttatcacacaattatcattgaatataagaaaatactaaaaatgtataacagcatagtacccccaggagctactgtcctagattaaagtgggatgactgcaagcagggtagacagaaagaaggctgtgaaatacagcagaacatgaagctaataaaaatgaatgtggcagagacattatctagtgaaataagatgttaaaaacacagtaaatgaaaggatacagtgttgtactgctcagtggtatgaacccatttttattctttaaaatcatataggcatttatctaacctatataagcagaaaaaactctgggcagataaacacaaaatattaagcatggttatcactacatggaataattgggtttttaaatttttcctaatactcattttctgatttttctacacaaaaagcgtttttaaaaaataccgatatgggcggtggctcatgcctgtaatcccagcactttgggagatcgaggcgggcagatcacgaagtcaggagatggagaccaacctgtgtaacggtgaaacccgtctctactaaaaatacaaaaaattagctgagcgtggtggcacgcacctacagtcccagctacttgggaggctgaggcaggagaatcgcttgaacccaggaggcggaggttgcagcaagctgagatcatgccactgcactccagcctgggggacagtgcaagactccgtctcgaataaaaaaaaatactgacatgagtgcaaaaagcaggtatagattaagttttcataaatatattactgacttgtgatcaagagaatattgtcagacttaagaaagtagaagtcaacacaatactaagcagcaatttaatagagtgctaatctaatcagaaaaggcttccaaaattctgccgagaaagagaataacattttttgaagcacatgatattcgcttggaggagaaagaaacagctttttgttattttttgctgtcttagatcacgctgagtttttactgcaagaaacctatgaaaagtacccattactaatagcactcaggtaagtcctcacagatgaatttatttcacttttgttctcactaatttgtgaacattgcttaggaaaccccaagctgatggagcattaagtgctttcagataatgagatacttagtaatccaactaaaatatctgtttaaagaggaatgtgagcatagggcttccactaatttgtttttagaatgatggcttaggatcacttacaaagtaacatatgctcaaatctaaataaacaaggtaaacagcaatgtaattaattattgatgcaatacaaagtaataaccagaattgtgtgctgttaaaacaatgtactgcatttaataactcaatttgtgccccagagaataagattacttttctacatacttaaatgctggggtgtttgtacttaggtttacatattattcttaaacaaatatttaggtaagttctcagtgatatgctgctttcatttcctggaatttgaatggcctgatcaggtaaccagggatgctgttgtcattacacataagggcaaggcatcttttaccatctcctaacttttctaggtgaggcaatgcaggggaaactaaccttggagtccaacacacctgggtcctcatctcagctcagctgtgtaattttggtcatcatctcactaggattctgcagtgtcatgtatacactagatcttagccaaaaggccacgaagcgatacattgtcatgtataatatgggggttttcttttttctttctttctttttttttttgagacagggtcttgctctgctgcccaggcaatggtacaatcatggctcactgcagcctcagcctccctgggctcaggtaactctcccacctcagctcccttgactccactgctggaactacaggcacgcaccaccacacctgactaatttttttctttcttcttttttttttttttgtattttttttgacatggagtcacgctctgtcacccaggctgaagtgcagtggcacaatcttggctcactgcaagctccacctcctggttcatgcctttctcctgcctcagcctcccgagtagctgggactacaggcgcccgccaccacgcccagctaatttttgtatttttagtagacacgga[135 bp omitted]ttaacttgcagtctgtgaatacacatgaatgagaagagcaagctaagaaaaaattaggtgttctgagtaaaagcagctgcattaaaatggcgaatttcaccaattttattgacgtgagaaaaaggcatgctttatttttaaacgaaaagtaaatgtaaagaatagaagttatatatgatttaagaatctactgttctttaaaatacaaagaactaagaacttttaactttggtacaagttggcagcttaatttatctgatctataaaatgtttttatgcctacaaaacaatctgaaatttctcccaagggacgtttacattattttaaagtagtgttgtatatggtactcccccgagtctcgggtgctcaaatcataaactatgctcacagtaacaagttccctcagaattaatttatatttccagcttggacttctaacccaaatctcagaactgtacatccacttgcctacttagcatttctacttggatgtctagtggccacttcaaacgtagcatgttaacactgagcccctgatagtgtcccacacctgctcctcctgctcgctataccccatgtctcatctgtcagtaaagtatgtccagaatccatttatcttcaaagtatatctagaatctgtttatcttcaaagtacatacagaagccacccgtcttcaaagtatatcgagaatccatctatcttcaaagtataaacacaatccatctctcttcaaagcatatctagagtctgactacttctcaccacctctgctgcgatcacccaggtccaagtcactatcacctctcccacctgaattattgtatagcttcttagccaaatggttccccttcaatttattcttaaaacagcagccggagtaattccgttaacatgtaagtcacatcatgccattcctctgctcaaactctccaatggcaccccagctccaatggcaccccaggaaaaatgtcaagtctttctatcagccttcctggccttactggccttcctgaccctgatccacccacagctctgaccggatctccttctgctctcctcttcacacacgcttcactccagccttactggccacctccttgctcctctgaacacactaggcaagctcccatcaacaggtctctgcatctgctgttccctctgcctggaagtctctcctcccagctgtctgcgtggttcaccttccttcaattctttcttcaaatgccaccttctcagtgaggccttccctggccattctagataagaccccctactacacctccgaacactccctctctccacattgtgctttttctccacagcatttatcaccaactaatgcactatatactttgcttctttatcattatttttagtctgtctccccccactagaattaaaactccatgaaggcttgcatttttgtcttttttgcttactattttacctgtcaagacaaggatggtgctcagcatattgtaggcgcccaacagatgtttgctgaataaatgaacttctccgaaatgtaataatacctgataatatgtttagcctgatcaatattaattaagtacaacagacagaagtcccagaattgtcatcaaattagtagaacactttgggagggataacaaattgctcattcattcattattccagtcactggaaaaacagaaatgaacaagtacatatgatacctgtcctcatggagcttgcagtcaaagtgaaggtgtccactcccctgccccataaccagaaccaaacagtgcctgtgggtaaggccaaggtcacctggcccccagttctccaagctaacaacatgtgaattatcctcaattctttcttctccctcaccttccaaaacaattacccaatttgtcatcaagacctcttgagtctacctgaggaacgttccaaatgcagtccaactctccaactccactatcattcaattcctcatcctacatcatctgccacttgagaactgcagcattctccaaactaggatctcaccacaggctctcctactccaatctgtcttacaaccttagctggagttacctgccccaaaacaaacactgttccttttcttaaacattttttggccaggcacggtagctcccacctttaatcccagcacttcggaaggccgaggcgggcagatcacaaggtcaagagatcaagaccatcgtggccaacatggtgaaactctgtctttactaaaaatacaaaaattagccaggcatggtggtgcgcccctgtagtcccagctactcgggagactggggcaggagaatccgctgaacccggaaggcggaggttgcagtgagcccagatcgcgccactgcattccagcctggtgacagagtaagactctgcttcaaaaacaaaaacaaacaaacaaaaaaccacatttcttcaaccgcttcccattgcctacaaaaggatatatacaaggtcctgcacagtctggtcccaaacataccttgacaagtacaaacacagctctggtttttggttttgctttcttttggggtttttttttttttggttttgtgtttgtttgttttgccagataccataccctgcctggctgcttggcaaatacccattaatccattattcaatactcaactaaaatgttaccccttctgtgaagctctctcctattccctgcacaacagcacatttccctcctctaagctcctataacatttgttatacttctgtcacagcactgaaaaacatgatctgttatcatttgcatagcttccttggtcactactgaaaggaccatgacttagttattttcggatactctatgcttagtagagggcctacaacagaaatgcactcaataaataacttgaataaatgaatgaatagcattgtcacaaagagctttcttacacggccctgaaatggattccctggcataggttctacctactgttactggttctgcttgagatcacagagaacataacctactcttgttcacatggatgccttctgatttgaaagcagacatcaagtccttctgggtctttcttctcccagacaagcatgagtaggtctttcagcttttgtcacatatcacaagctcacatctctttaacacctggtcatgcttcttctgaattcatcctagattatttatatccctttagaacggtggcacctaaaaccaagtgaatattaattcctttgttgtagtcacaactcttcaagtaatctaacctaaaagagaattaagatttgggggtttacactaactgttggttcatactgcgctcactatggactgaaaattacttttaaatgttttaaataagatttgtttgctttcattatgagtataatgctcattcatatttttgtaagctaaaaataggaagaaaaacaaatctcattaaccaaagacatctaaaccactgcatatattttggtaaattagtattttaatgcaaagggggttgtgttttacactcctccaaccatatgatatattcacaatttatacatattgcaacatataatatttttaagtatttctagttgacagtaactgccatttttacctattaaccatatgctattctaacaacaatcctgcaagtgtatttgtgatttagagaagagcatactgaagcttaggaaaattaagtgacttgctcaaggccatgtgttatttttccctcagtttatcagtaaggaatgttaaagagcacatatagggcatagtttgctgaatttggacacatggatagtcctaacccccttagagatcaatacatagaatatttccatcacaccagagggttctcttctgctcattcccagttaattctcccacccaggggtaaccactattctgccttctatgacgatcagtcactaatcaatttgcctactcttccatcaaatcagtggaatcatttagtatgtactcttttggtctatcttcctttgttcaacatagtgttagtgagaatcattcatgttgttgtgtgtgtcactaatttgttatttcattatcaccatacagtattctatataggaatataccacaatttaattacattaactattatagttacataatgacatcatataattatattaattattacattagattataccacggttaagccattctcctgtttatgaacatttggattattttcagttttggtttagtttgaatgaagctactctttttacacttttaaaagtctcttggtagacatgaattcttctcctgagtatatacctaggagttaaatcgctaggtcataggataggtatagagttagcctgaggagatactgccagttttccaaagtggctgaagtaatttacatgtttcccagcaatgtgtaagagttccagttgcttcatatcctcaccaatatttttttccttttttttaaatggttcattctgaatcctcaccaatatttgatttttgtcagtttttaaaattttagccattctgatgagtgtgtaatattatctcattgtagttttagctcccattttcttgatgtgcaatgatgttgtggactttttaaatgtttattgatcatttggttatcttcttttcaaagtgcctgccttttctttttttttttttaactgggctgtttgtctttttttttcttttggtagttctttaaatgttctagctatgagtgctttgtcaaatcttatattatataggaccataatatataataaaaatcttttcccagactgtggctcatgttcattgttaatggctatgcattactcaattagatctaaccaccgtttaatgattctcttactgctggacatttagattattttctttctttctttttgcatccctaggtgggcacaaatagactatttctaatttttgctttaattaaacactgataaccaaaatttaaagctttatttgtatctaaaatctttccttcatccatactcacagaagttgaattactgaattaatgtacacaaccatttggtattgatgcagacagagccaaactggttcagaaaaattctatcagttgatactggtgcccaataatgcatcataataccaactcaccatgtcctcaccaactctggcttttcccctattttttatcagtctgataggacaaaaaatttgtatttcattgttttaatgtttaactcagtgattactagtaaaatcgaaattacttttgtttagtcatttatattctcattttcataaacggtcttcattttgtgtatgcatttatcaagtgctttttagagttcttctcattcactaaggtattgtgcttttcttttcatataatactttacaacatttttatttttatatttactgcaatcatttcccaagatgtaatgttctttgtgcttttcaaatttttatgtagttggatcggtgatcacacccaagcttagaaatattttttccctacaatattccccataaatctaagtatttccctataaatattcatgtcaaactatattcttaaaattaaaaaaattaactctttaatgccttagcaacctttttgggggtactattaacatactggtctcatctctaactcttatctttttccaaattaataaccagctctggcaataccatttatcaaatattcttttcctcttcagatttatgatgcataccttatcatttattaaatttttagacacgaaatagtctgcttctggactgtcttttcagttccatcgatttggtcttagccttataattatttcatttgaccaatatttactaagcacctgcatcacgttagattgtagggataaaacagggaacgagacatagtgactagatagtcactatttttatggtgcttgaaggctagtgagaagatggagacaagtaaacagacagacgggaaaagtacaggcaagagctcaggctggagaagtattaagggcgagatcacacaggatattaaagatctaaaaaatgagtttgcactttatcttgagagcaaagtaagccaccgaagggcttcatcgggggcaaagtgttcagataggcattttagaaagatcactttatctataagaaaataaaaataatttactagaggaagtcaggagtacagtcaaggagcccacttaagggactatgaggaatattaacaactgactcaatactcttcttcaaacttttctatgctactttcacatatttagtttccacataaactttgaaattgtttagtcaatttccctcctatacacccaactccaatccaattgtgattttatttggaagtacactaaatgcttaatatatgaaaaattacaacttgattacatataattttccataaggtttttaaacaattgctattcagccatgtttccttccatcatatatttttgcaagaataacataagttgttagcaaaacaaaaaacaagaaaaacaagcagagtaggaacaccttaatagtttgtctcaaagtacaggaaatgtcaagaactaaaggaaagcaaaagcaaaaaggactaagtctaagccaagaaggtagactaagctgttggagagaactatatggacaatttgttaattcagtgttaaacagaggtataccttggtcccaaggaagaaagaaccttatttttccaagagccaagaagtgaataaagaaaaaacttcaacctgaattcaaagcaagctggagccttatcaaaataattgtaacctatagtggcagggcctaagaaccaaaggagtggaaaagacctgccagagaatttaagtgcttttaaattgggccagactaagttaggagtaattgcgtgtggctttaatcagtttgagtttggattctctcataccatagtgcagtaaggctgtgaacctggaaacactgtgagctggaatatggacagcaagttgaaggtaaggggcaattccagagaaaggcagaggatgaagggaagcatggggaaggaagctcaccctataggaagagattaatcctcctcaacctcttcagtacaaacaagacaggacacataattctgtgagtggacaaaacagagatactgctcatatttttaggcctgtatttactctcaggatttttaatgcattttttccacaggggatttgttattctgaaaatgggttgagtcttattttgcaacgtgaatagtgagatatttaatacaaggcaaaatttaagaaattgaagatctgacggtctgacaaaactaccagacacataatgccaaaaagacatagttctcattcactttcctttccagggctgccattcaaagccgtctccttttagaaagaaagaatatttacacaaaagatcttgtttcaattacaattttcttgttccatctttttatgtgggcagagcataattccttcattcaggagatgtttaccccactggaggcactagggctataaagatgaaaagagagatgtagttcttatcctcctggggttcatatacaacagattatacagataaataattagataattacaacaaaaagcccagggtgttactggcgcacactggagaggatctggggagttcaggaagcagcctggaggaaatggcatctaaaggaaggttgcaagggtatctcatacgacccaagggttaggaccaagataattagaaccagattctggaacagagcttttctcaacgtgggagtgatttacaagtatgacctctcagaacactgcagagtacagctttttacctgggttcagattacaggtgtgtccgccagccataagcacagccttgtccatctccttcaatgggcagtatttatattaccatttgctatgtgtgtcatgacataaaaaaggttaggaatcactgcttgtaaagaactaaggaaatgtttttgccttttggctataattcattcttattctctccctctcttactctctcgtctttctttcccctcattcttctctactcttttctactcttcaaccctcagaacttgactcccaacaattccaaaacatacacattctgaatttcagccaccaaaacagagagaaagatgatttcatttcaaatataaagtcctggggaagaactgtggttggtccagcttgagtcagatgcccatccttggacaaatcaacagtgaccaaaaggcaggaatgtcttgtgcagatgatccctaacttatgatggtttgatttttttgacttcataatggtgcaaaagtgatacacattcagtaaagaccatacttcaagtacccataaaaccattctgtttttcattttcagaatggtattcgataaattacaggagatatttaacacttcagtataaaataggctttatgttagatgattttgaccaactgtaggctaatgcaaatgttctaaacatgttcaaggtaggctaggctgagctacgatgtttggtaggttaagtgtattaaatacctttttgacttacaatagtttcaacttatgatgggtttatcaggctgtaaccccattgtaggccaggcacagtggttcacacctataattccagagctttgggagacctaggcagacagatgacttgagcccaggagttcaagaccagcctgggtaacatggcaaaaatcccacctttacaaaaaatagaaaaaattagccaggcacggttgcatgctgtagtcccagctactcaggaagctgaggtgagagaatcacttgagcctggggaggtcaagactgcagtgagctatggttgtgccactgcactccagtttgggtgacagagtgagaccctgtctcaaaaaaaaaaaaaatacacaacccctttgcaagtcaagaagcatctgcatttaaattgtagctcccagagttaccatctggctggattggagaaaagggcactattcagataaaataataggtgtctactacaaagtttggatgctgaagggaagcatctgggagacaggacaaggatgaagattcaaaagagtaaaaagataatttcagagatcaatgtccctgtgagggtgaaaaaagacaggactcacgatagggtaggcagaattagcctaatagaggaggataagcccccatctcctattgcaacaggaaggaaggaagaaagaatggataaagatgcggtctttagatgtgccagaggaagtgggagttcaggtctgcagggtatttctctgggaagcaggaaggtgatgcaggagacagggagtaggctagtaataaaagattagtgaaaaggctaagaaagagacattacacaaaataagagagagagagagcagtctagggaagcacagaagtaacgtccataaatttgaagatctgagtgagattagcaattatacatttatttgtacccatctgtgcagtagtagtattttctccagcaagtctcggcagccccaatattggatctgtagggacaaattaagatgagccatttgatagttccaggactggggttttgccaggtgacggtccctgaaggtcagcggaacaaggcagtttaagactgggaagacagggatacaatggagcttggactgagagttgtgggtctgaaggaagaagaagcagtatgagaacaataaaatagaatggcattctgggagataaccaagaacacaggggatgtgaagcgtaagttactgcaaggtttccgagacagttaatcccagcagtgcccaggtggacaggggtcacttaggactcttaggagttggctgcacactggattaatggggtttctgatatttttcttgattagaaatatgcagttattcctcaaagtctttatatgtagatactttatacactttaaggggctctctttcgctctctttctctttctctcccccactcctcatctgttcctataaaatgcctgcattctttctcagcaaaggtgatctaccccaaccagacaaagctgtgtgccatttccaagatgttgctggcactcgaactttcactcaaggtgtcttacataccttctcctcactctcattcagaatgtgcttccacattctatgcgctcagacttcaaaatctcaccaacttcaacatccaggtaagtatccaatttcttctaggaaagtctctaagattctacctaacccaaatcactatttctttcaatacacaagtttttcgtactcaacacagttatactgtcatttgttttatttctatttctttcttttttttttttttttttttgagatggagtctcgctctgtagcccaggctggagtgcagtggcacgatctcagctcactgcaacctctgcctcctgggttcaagcaattctcctgtctcagcctcccaagtagctgggactacaggcacccgccaccatgggccagctaatttttgtatttttagtagagacagggt[136 bp omitted]cctcttaaattcaagttttaagccaaaatatgtgtgagtgtagctggagcctaagaaagactattgacttaaagtacacagccagccaaacatgcagacaaccatctttttattctaaagcttacataccacactgagtatccataaagaacaaactccgacgactaaggaaaaaatagagaagtgtgcttatacaaaatgtattcaaagctgcacaataacctgccaaattagtaatggaatgtcaaatgaatcaaatggaaagcataatactgactactagccttatgtttattagtcactaaatcatcatgtattctatctggcatgctaagaaaatccaaagtcaccaagctttattttcccctatcttaaggagaatagaagagatggaaataaaggaggcaagaatggtttacagatccagctgaaaccgaatggaaggaaaggcagtggatttcatcaagatcctacagacaaggtgtaagatctgtaatttcgaaaggacatatacacaaactcattcagccacattccagtctagaattaacatgaagaaaatctattaacaatggtaaagcttttttcctctccaaatgaatatggcaatacccattctggagaactcttattctctgttgaaataacaccacttttctatatggccatctagcaataaatataaaaatggttaatttgcatacatttgacttcttgacttcttattttacttctaggaatctatattaagaaaaaagataaatatattttatatatacacatatacacacacacacatatatatacacatacatacacacacaaggatatttatcagcataatgataaccttattaacaaaaaactagtatcagctcaccagtaaatttattaaatattctattatatgtaacacaacaagtaacatataaatacatgtataaaacatatactgataagtgacaaaagcaagtttaagaacagtattaggctgttcttaatatgtatatatcatgtatgtgtatatataatatataatatgtatatatcatatatgatatatatatcatatgtatatattataatatgcatatgtatatattatataatatgtatatgtatatattatatgtgtatatatattatatatagtatatatgtgtatatatactatatataatatgtatatatgtgtatatatactatatataatatgtatatatataatatgtggctcataactgtaatcctagcactttgagaggctgagacaggaggatcacttgaggtcaggagttcagaccagcctggggaacatagcaagactatgtctctgtaaaacatcttctaaaaattagctgggcatggtggcacatgcctgttgtcccagttactacagagttactaaggcaggaggattggttgagcccaggaacttgaggctgcagtgagctatgatcacgccactgcactccagcctggatgacagggcaagaccctatctctaaaaaaacaatgtataatgtaatatagttttataaaaataaattttaaagtaatactgatgtgcatgtaccatataataatgtcaaatggggtatgacttctgggagactttctctttataaatcttgtgtttatgaaacacttgagttaggaattttgtataactttgtattatattcataattagaaatgtatagatattttaaagtagatgtatatctattgacacgtaaaatgtcaacagtacaccttttaaatgaaaaaaatgcagcttaaggcaacatattcacgtttctaaaaagttacacacataccaaaggaaaaaaaaaaaatctggaaggctacaccaaaacattgtcgatggctattctgggtggtgagatttttgtgtgatttttgctttcctctttgtaactttctattttgactccctttttaaaaaaattaagaccacatactatttttataaatgaagttttcacttaaaaacttcgtcttcaattttcactagtaaacctttttaataactaaaaaggttcaacaatactgactttaattatgcttcctctccctattcactcaatagcctctaggtttacccctgcctaaagaatcagcagtagaacaggagaagtaataggactgagattatcaacaaaaagtggttggtttcagctttgctacgaaaaaaagatagagtgccataatattgataatgtcattttatattttcaactgatgatttccaaagaggttttacaactacaatcatatttggttctcaagtctatgaagatggcagggaagtataattcccccttataagataaacagtctcagttagaagaggtagagggatgtatccaggttcttgacttggggagtgacagcgttgtcctgcatagttcaatacagtagccacgagccacatgtggctattaaacttaaattaaagggaaataaaaatgcagttcctcagttgcactggccacattttaagggcccaattgccacaggtggctcgtggctactgctttggatagtacggtacagaatatttccatcatcacagaactgatgtgattcccactccaaggacattttccactcctgtggtggctttctacacccttgctttgcccacttaaagtaaaggaaaatattatttgagcatcttactctgaatggtacgagcttctgaaatactgtagaggaaaaaaaaaaaactgctgaattcataatacaaagatggctagggtagccagagagtggtgagtagtgggagaaggtacaacgaaagcctgaagggtgatagagtgaactctgagggttgcctacttagcacctattccctctcttcttccttttaataggactaagattttattttggtatctacccctacccaacatgggctttgtcccacagagttcaggaacaggcctgcaatgcaatttgggcttcgtcacacaagacaaaaagttagctgataagagtaacaccttttgaggctttggtcttaacctctgaaaggccaaacagcagaatacctacttcaacattatctcaggcattaaccaaaaagtgtatgtgtatcatgtgatcacacacaggactattaatagttatagctcatcagcataacagagtccacaatatgagccaagcacatcactctgttttactaatatgtgtagtatttctattagctttattaatatgtgtacaggtgagtatctaggtacattctgaggttaaaaaaatctaattttgtgctttgtgttttgaaatctacaatctgaaatagaaatacattcttgcaaaagtaaattacagtaataattaaataaaaagggaagcagactgataatacaaacattaacaagcacattatctaagtagactttgtggagaacattactccttttgtagacaaacatttataaaaatttaaacaatcaagacaggtcaggcacaggagtgataactgatgcctgtaatcccagcactttgggaagccgaggcaggaagactgcttgaggccaggactttgagaccagcctgggcaacatagctgcccagctaaatttttttaaacaaaaaatttaaaaattagccaggtgtagtggtctgtgcctgaagttcaagctactcgggaggctgaggtaagaggaatgcttgagcccaggagattgaggctgcagtaagctatgatcacaccactgaactccagcctggggaacagaacgagaccctgtttcaaacaaacaaacaaataagtaaataagacagaatagggagattagatgatagcacaattctcctctttatagaatttacagaatcataacattaaacaaaacaaccatttaaaaactatacctgaatttagtaatttaattccatgtagcccatgagtcttttaagaaaaatcctaatttgggaattcttcatacatggcatgaatgagttagatacagaatgtcaacgatgccaaacttttatagaatggaacatcagtaccaaaaactatcatgcaattttcaatggaacaaacatggtgaaagttacgagtgattttggaatcacaagcatatatatgctgctttgttcacatacttcagagaataattatagcccagagaaaagaaactaaatcactggccctaagcagaaagacagtggccacttgccatttttttctcagctaaagacaaactgcaggacatatcttggaactttggaactgtctcatcagggactcacaaaaatgtcccaatgggatagaatagttattactattattttgagactgagtctcactctgtcactaggctggagtgcagtggcacaatctcagctcattgcaatctccacctctggggttcaagcaattcttgtgcctcagcctcccaagtagttgggattacaggcatgccccatcacgcctggctaatttttgtatttttagtagagacagggttttgccatgttgcccaggctgatctccaactcctgggctcaagcaatccacctgcctcagcctcccaaaatgctgagattacagtcatgagccaccatgcctagccagaatagttattattaatacatgttaaaaacatggctcaaaccaaagaaagcttaatattgtcctcagcacacaacagtacctatacagtagaataagaaccaaagattgtttatacaaaaattaattcactgctgaaaaaggcactaactgagaagccgtaaagtacaagtatttcctacagggtacctgctatgtacaagcttctgtcattctgtttcagagaagatgctgaaatgaatacacatgaatgaaagtgtgcagtgtgtactatgaaaaatgggcctctctccgttctagttagttaatttatttcagattaaatgagatttaagatatgactcctggaccaggaaaaatgctataaaacatatgattagggcaattgtaaaatctaaatatggactttggtacaagattattatctaccccatgtaaaatttcctgcttttcataactatgctgtggttatgtaggagaccctccttgttcttaggaaattcacatcgaagaattaggggaaaggggcaggatgtctgcaacttactctcaaatattggtaagtgagtgataaggcaaatgtcaaacaattgatgaatctgggtgaaaagtacatgggagttcctgtaacttttctgaaattttaaatcatgtcaaagtaaaacattaccaaaacattaattctttacatttccttatgaaaacaagtagttctgtggtagtcaagtctcagaatgatcaagaagactaaatgttttgtatgttacagaggccattagtgggcttgaggagttgccatactctgtccttagctctctgttgcttacactggatttaaaacggattcactccttaaagtggaaatactcttgtttctgtggggtatcagtccctgatgacttccagcttgaattactggtgccgttgctacctaaccacagtcccccgtcccacacccttcttgccatagtaggtagctgggctcattcagtgcagtagtcccatgtctcatatttgttccttaaagtacatgctttaagagaataagccacattgtaataaaggggctcctagatgaccatttcatagacactgccaagttccctaacattcttacgtacctgtgcaaagttacataaacatatattattaagtataagaagaaataaattgttagaaataaacatgtagtaagacatgtaaaactggaacacaaaatcccttaaaaattaagtgttttccatgaaaaaatgctcatcatcactggccatcagagaaatgcaaatcaaaaccactatgagatatcatctcacaccagttagaatggcaatcattaaaaagtcaggaaacaacaggtgctggagaggatgtggagaaataggaacacttttacactgttggtgggactataaactagttcaaccattatggaagtcagtgtggccattcctcagggatctagaactagaaataccatttgacccagccatcccattactgggtatatacccaaaggactataaatcatgctgctataaagacacatgcacacgtatgtttattgcagcattattcacaatagcaaagacttggaaccaacccaaatgtccaacaatgatagactggattaagaaaatgtggcacatatacaccatggaatactatgcagccataaaaaaggatgagttcatgtcctttgtagggacatggatgaaactggaaatcatcattctcagtaaactatcgcaagaacaaaaaaccaaacaccacatattctcacataggtgggaattgaacaatgagatcacatggacacaggaaggggaatatcacactctggggactgttgtggggtggggggagaggggagggatagcattgggagatatacctaatgctagatgacgagttagtgggtgcagcacgccagcatggcacatgtatacatatgtaactaacctgcacaatgtgcacatgtaccctaaaacttaaagtataataaaaaaaaattaagtgttttcatcttacagctgtaaaaataagtttgaagcccaaattgtggacttttgtgtcccttctacagtttaaaacaaaacacggaaggaaatacacttcactatcatgacatgtaatccacaaattacatgtctaacccttgagcttcttttagaaactctcctcactaatttgcctgtgtttttgaatagcaagtaatatgttttcaatcatgaaaggttacagggaaatttttgtggtaaaaactggccttccactggcataaaaatcatcagtcttactgcaatcctttgggaaataactttttttttccattattgtcaagcaactttcaaaccagtttaatagctactgttcttgagatggctctttacatcctttaaaactgatgtcactcaagaccatgtaagagaaaacaatgatggtaagtttcataaaggagttatttctttacaatattttgagagagaatcaaactatgtgaagttttaaaaataacaattatccactgatacttaaatggacaattgcccatcctccaacacatcacacactcagacctgaactactgcactactctttcaccatgggtacaacaatcctatcaaagaatgcagccactttattttgaaataaaattgtatttgatattaattttttaaaagtattcttcaggaaaaaatgtctgagcagtataaaaactaagtgacttttgtaagtgctctatttacctctctttcattgtttctctataattcctctgattaaacactgctccactttgtaatatgaagtaattttgcacaggaataacacagtagagtaatgctgtctgattttctttcttctccctaactcactcttatgtaccctgttttttgtttgtttgagatacaccatataaggacataccaagttttctaaaatttaactacaagcattagtgaatttgaggggaatggagtcttatcaaggcttggattgggcttgatcaccaacttaccatgggagtcaatctctgtctcttttttctcatttatgagagaataaacctccctgtacctactttaaattttagttaagaatacttatgaaaactttttttttttcagatgaccaactgtttacttcatttctcccctgcacctaggctgccaagtactatgaaaaacaacaacaacaacaacaacaaaaactcaggttgaccaattggaaactctataaatccatggagttcaacatcaggaggacctttggcattgtctggtgatccttgtacttgtccttcaacagctcccaaatcagaaggtaaacctattcactctcacctcaagtcgatgtttctaccattccccccactctcagccaacatcttgccttctatttcacaaagcaaaataaaatccaatagacagaaacaactctgacttcctgccactttacctacatccaccctaatcctgaccaccttttttcctgagcctgaaaaagagggagccccagagctctggaacccatcctctctcacttcctcaagcatcttgttccatcaatgatcaactccaattcccacagacatgcctaagactcttcacctttaaaaacaaacaacacaatattttccaccagttctgcagcccttctatcaaatagtccatatccacctcatctactcctcagctcaatgcaacctggctaactccctaccattctaccaaggcttcccatcaccaaactcaatggtctcctccattctttgcttctgtgatctctctacagcagtggtccccaaccttttgtgcaccaggaacaggttctgtggaagaccatttttccatggacccaggggggtggtttcagggtgaaactgttccacctcagatcatcaggcattagagtctcataaggagtgtgcactcataaggagtgtgcacacgcacagttcgcaatagggtttgcactcctctgaaaatctaatgctgctcatctgtcaggaggtggagctcaggctgtaatgcttgctggcccgctgctcacctcctgatgtgcagcccagcccggttcctaacagaccaccgtaccggtcaggggcctgggggttgggacccctgatctacagcatttactactgctgttgtttccttctagaaattctctcctctgttagtttctctcgtaccattactttctagtttatttcttttattgactcttcttcccctaaaaccttcaaatgttagaactgtctgccagtggaagtagaaattgatatgaccattttgaaaaacacttgatgaaatgtaaagttttttttgttgttttttgagacagggtctcactctgtcacccaggctggtatgatctcagctcactgcaacctctgcctcccaggttccagagattctctcacctcagtctccccagtagctgggactacgggcacatgctaccacacctggctagtttttgtatattttggtagagacggggtttca[132 bp omitted]tgtagccaagttattctacttctaggaatccataccaagaagaattgtgatcttagaaaataattctcatacagacatattaaatgcaatgttacttataatactaatatgctactatgcttgaattaatggtaaatagggtgcaaaattgtctgtagaatgtcgtctcaactatgtggcaaatacatgcatagttttttcctaacagtgactttcttggggaatgagaattgaattatgggtgaatattattatcttattgtctttatatatttctatatttttcaatttttctacaagaatcatgtatttataaatttagataaaaaaagaaacaattttgagaaacaaaccagaggtccaaaagacctttttgtgaaagatggtatttaccttcacttctcactgtatacattctctaataaggtaatctcatatacttcaaaagcatcaaatgtcatcatatacagatgactgtaacacctatgtcctgactacacaccactctaatctgcttcaaaactgtacagtccagtacttccatctggctactagacaattccatgtgatgactcgcaagaacaatagcctcagcctgttatcttaccttctaacccacactccaaattttctttcctcttgcatctctactctttgtaaacagcaccatcgaaatcaaataccaaagccaatcaattctaccttctcaacagatatgaaaaccacgcctctgtgtctctcttcccactttctcactagtctcacttggactctttcaacaatttcctaaatgttctctctacttccagcttcagtcatgtgattatatatctccttcattaacaccacagtcttctaaaatgtaaatctgatcaagtcatttccctaattaaaatccttcaatggctccccatcaccacataataaaaaatctttagcataggatttgatgaatttattcttattctatggccaacttgccaacttcctgctcacactttagttcaaacatctcctttgaagcttccgtttacctcccagaaatagttggatgcatcctcctctgagttcctggggcatgccatccatatctccatcacagcatggattacactgctgtaattatttccatgtctgtctttccctatagacctggattacacaggggcaagggaaggattctattcatttttgtatctctaaaacctagcatatagttgatggataattaactgctaattgcttaaatgaatgatttggctcacaaacgaacaaaaagtacatgatggattaacaaattatggatctttttttccacacttctgaaccaatgctctagaatcaatatatgcaagatggcaaatttacccaataaatttgtcaataaattattgaaacaaacagtaaattcaacattaggaagcatggtatctgcttcaagttcaaacaactgtctcgcagtgatatttaaagtacgcacattttaaacttaattattagaatcttcccccaacctcttatttcctctttctcaggaatacacttgaaagtcacctttcatagctactgatttcaaatataggcaaaaattatcttagtttcctaaaaacagaatgaaaattcaaatactttttttactagcaatatcaacaacttcagcatactggaatcagtccaaactaaagaaaaataaaatctccttttcactccacggaaagtttcttttacattaattgcaagcataggcaataggtaacccttgggaattttagcttattaatcagaatcatcattaagatctaactcataagagcttacatgaaggaataaaaatggatcctggcagagtagactagtaaaaatttatgaaactctgaaaaacagatctcttccttacttagccattcagaattcctcacaaatgagtcaccttcctccaagaaaagcaaagttccacctgaaataaacctgaatgtgaaaagcttgcacatctaaaggaatcaacttcagttcttctctgggctaaagggagaaatcattggcgaagccaatggcaaacaacaaataagaaataattcttgcttcactttgggatacattatacactttatgcagtggtgacagatttaattttatttaacaagctaacatcagaattagtttgtactccctgtacacagaccaactgggccaggttaacacagtaaaaacatttatggaagtaaaaacatcccataaatgtgaaattcttgaaaggcatctgagactcaaaataaaattagaaagtgatttgagaagtaataaacacagggtaaaggttgaataggcacaataaagtccgtaactatagctacagaatacatgaattgaaagtagagagctggaagtagagtttcctggaatgagggaactggatgaatctgcacgctttaactgtggtccctatgaagatgccaacatatgatatacaaatgtgtatgtgtacatgtgtgagtgtagcttcactcacacacgcacacatcccatatttggcagttactcttgcagtctctgcaaatccacgaagtcatgacacaccttcaactaacaataaaattgttggttccatccccattggctgcaatgaggtttatgatgccatatgtaaggtcaaaggattgctacaaacctttaattgcttgctgatttttgtactgtttcctccatgatttccttgaggactccttgtggccttttttaaaaacacacttttattgaagtataacattcatacataagaatgtacacatctttagtacacgtaaccactgcctgtgccaagactgttcccggcacccccagataccctcctttagtctcctcctaattactgtcccctctctcttctccaaaaataactattatcctgacttcttacaccatagattagtgttgcttgtttttgaattctatataaatgaaagcatagagtacgtattgttttctgtctggcttcttttgctcaatgttatgattgtgagattaattcatgctgatgtatgtagctgtaattcattcacctttgttgtcatctagcattctattgtatgaatacaatttatttttccatcccactgttgatggacatttgtgttttttcttaggtttcgactcctactcctacatctaacatagtactttccccctttatttctacactgcagaagctgcaggtctagtattatttcttgcatgcctaatatcattcattcacttaaaaaaatctttggcaactattacaaatcaaaataggtctgtagaagccaaaataaatggagaggaggtcacaacagagtaaacaatacatgttgtgaaacatactcatctctggaacgcacagcacagggctctttggatgaggttgtctgaagcactaactcatggatccatgctatgatagtctgtaggactagctttcattggctgagagtatatagtcattcttattcccttgttcttcttttactctcatttttaaggcaggcatttcagaatgacagcattataatgacggtaccgaattttgcagctttaaacaaaatgtatcttagttgccatcaatcagaatgtgcatgcagatgctattcttggatgattttttttttctttttgaaatagtatagaccacacagcagctatactatggtcagtgagaccaccctgcctgggaacacaaagacttctgttgtatgagggagagatatggacaatttccacaaaaagcataggagccttcatcctcttcatgtctgctgctccagattccagcgcttcacatctcctcagacatctcatcctttgcagaagactctctgtcctctcaaatgtctttctctctctacggcctccttcccatcattacctattcacactcaactctcttggcttaaaaagtagcagaaaaacaaaaacctgtagctatggtcttctctcctttccaacacacttcttgaaagcaatatcactcagtctctagttgttcacccctactgactaacccactacaaactgttttccacctctacctctccactgagatcaccctaatgaaagtcatcaatgccctcttggatgctgtatttaatggacacctcttcatccttctcttccttggcctttctcaagtgtgcaactttgctgacccctctcttctcaacttctgtgatatcagactttcctgttttcttccaacctccatggacactcctcttcagactcctctcagggtccttattattctgactgtcccttaaatacagatctctttgaaggttcaatccttggcccttttctcacattttatgctcatttctgatcatctaaatctcagaggcatgttctatgagcactttgatctcaacatgagaagaggtactgggaaatatcctcctttttccaatattcttctcgatattctacacatacagtcatcccctccccccaagtctgtatcattgctctctattcctttccatatgtatgaagcaggggtagcagaaatgtcaagcactttgaagtcctgtcagtctggcttcaaattcaaactgcttcttaatcagttatgtgactttggcaaagccatcttctttctctgtaaacacgtgtttcatacctgtataacacctatcttgtagggttgaatagattataagagattaatgaatgaaaaccacctaacactgcacctgatgatgcctagtagctgccccaataattagtttccttcccattttccattttatggaatctaatcctgtcttcccaactgtaatgaatttaaggcagagctaatcctttaagaatcctttggccgggcacggtggctcatgcctgtaatcccagcactttgggaggacgaggtgggcaaatcaccaggtcaagagatagagaccatcctggctaacacggtgaaaccccatctctactaaaaatacaaaaaattagctgggcgtggtggcgggcacctgtagtcccagctactcaggaggctgaggcaggggaatggcgtgaacccaggaggtggagcttgcagtgagccgagatcgcaccactgcactccagcctggacgacagagcaagactccacctcaaaaaaaaaaaaaaaaaatagactcctttaaccctatcagactggtcttctcaccgtccctgaacatgtcacaaccattcacagaggcacccctgcatggaatgctctcccttgccattcttacttcatgcatacctaagtcttattcacattccagcattcagcccaatcccttaatcaataaaggccttccttaaccaccaaagctcagactcctcagaaattttctccacatgtgaactgtagaatattgctactaatcatcaggcatttattatatgctactttcgggggttacatatcttttcattccatttatctccaattatatcattattcttggaacgaattatatgtagtcctcagtatacacagtttctagcaaaaagctttaagtaatacctgttgattggtaatgttaattgttaatttgtaataactgagagcataacatcatttaatattttcaactgttcctttaaaatatgcatttagacaactggaatcctagaatgtatgactttagaggccacatagaccaatattccagatgcacaacatctctttacaagaacctaatgagtgaacctttaactccagtttcaataagttcacatgaccagaaactcattaccttctttgggaaccatttgatgtctaagtagcagttccaaaatacaactatcaatatcaggagattaacatatgatatattgctaagatttaattcttgaaccctattcaaattctaccaaatgccccaataaatgtcccttatagcaaaagtatacagttcagcatcatgcttcacctttagttgttatgtcttgttattctcgttgcttctagaatacttcctcagtctttcttggaatttaacatttttgaaggttacaggctagttattttaaagactggccttcaatctgagcttgctaggtgtttcctctgattagattcaggttatgcatctttagcaggaatgtcacagaggaagtaatgctgtgtttttctcattgcacctgatcacatggtacatgattctgatttgtcccatttctgacattgttcattttgatcacttcattaaggtagcatctgtcaggcttctccactgtaacaataatctttttttctttggtattaattaattgaacattttgtagggagatactaagtaaatatcccattcctcatcaaacttcaaaagttatttattagtttatgtaagtatggactcatggtttccgatttcattttgatgattaaactgacccagatttagctagtgggtactcacttaagctgctttctgaatctgttttacatttttcatcattctttgaggatttccttgctttctgaaaatacaagatgcccccggctcaccttgtattaatatttactttgtgacaaccctggaattacccatttctccacaaagccctgatttctttcagtggaggatggtactaggtgtgaccattgctattatattaaggtatcactgctcccaggtcctcacaatggacagagatggggaatacataatgtatggatataggtgcatacgcattcacatctatatttactcctctgtctagctgtatattgaaaacttctgattccaatctaactacaaagggttgactgtacttttcccctttccatatttggagctctcttttatgaccatgagaaacctgactccattatcctcaacatatttacttgtttgtcaatctccctgtttatcacttatctcccactgctgtcaccaagaccatgccagcacggatgctctttttccatactcaggtcctcatgcattggccccctctttactcaacttggctccaaactctaatctgggcccctgtggctccccttcccctgggatggatgcctaccttgctgtgccccaacccaatggctttaggaccaaattcttcaggaggaagagaagaagaggaagaaaaggagcagaaagataaatctacatctcttcacttttacccactggcatgaattctgtcttttggggtctcccagaataaacataatcaattcatacgcaagtatttgaggttggtgttcatgtcctgtcttgttccttcagtcattccttaaatgacatggtttcaagtaccctcaacatattgagcattcttttctgaataaatcctattctgtctacatagcttgtaaaactgtgtagaggaggcacttttggttgcctatccaatatcctattctgcccctaaaattccttctttcctaaaaaagcctgactttgttcaggtatccactcccttccatacagccacatgctgcaggaaatgagaaatctatcatcagcgcctgactattccatcatgataaccacattcctcttaccagtggcaggtttaataatgggcatgtgaccaaatgctaactaatgtgacatgtaaggaagtcttctggggggcttcctaagcaaggagcacaacacaagcagagagctcactctccttcctcaggacattactgtgcctgggtgagatgcacagaactgttgcaacgaccttccaccagctgaggatgaaaccagcacaagaagggcaaaaccaagggaatcacagacaagtggaggcagagtccttagggactggccagaacctctcttatcattagccttcttgttgtgtgagataacatgtttcttttctgtttaagccagtttggtctggttttctttttagctgcccccaacagcattctgactgatatagagtgaagctagcaaccacacacccctccaggagaggtgtgataagctagggaacttccaagtccctgtatttcctctgacatagcccaagtcaatggtgacacataacatagactactaagacctccatctttctcacacctacaacaatgttattttgtatttgtattgttaaattgttgcccttcaatagagaactagaggtttacttcttatttacattgtaagcttttccattgtttcaactagttcaggtcttttaagtgagaataataaaggaaattgaagagttgctacttgattgcaaagcaaaagagctaggaataggacaaaaaccgaataataaacacaaagctaggagacagatttttgcccccgtagtaaatgtgccactagactagtaaaaagtcctgactttctgtgtttctaacttcatgcatctatacaacagtgaggaacctcaagattcccttccggcattaaaattctatgactcaagagacttcatcagagaattcatggctcagaatttctctggcttgaagcataaaatgaagaaaagtaaatcccctcaaatcagtgttagcccattagtcattatcaagattcacttatttcaaatcaacaaaacactgccctagggctacctactccaagaaacaactctgttatactatagggatcacgtctgggctgtattggtgtttattctttttttttttttttttggaaacggagtctcgctctgttgcccaggctggactgcagtggcgcaacctcagctcactgcaagctccgcctcccaggttcatgccattctcctgcttcagcctcccgagctgggactacaggcacccaccaccacacgcagctaattttttgtatttttagtagagatgggggtttcaccatgttagccaggatggtctcaatctcctgacctcgtgatccacccgcctcagcctcccaaagtgctaggattacaggtgtgagccaccgcacctggcctgtatttattcttagcagaggaaatgtgtagaaaacaattgccaaatctgcaccctattcacgaatgtgacaaaaaacaaacattcagccatctcccagaccagagagattataggagctaaatgaaagaaagcccagatagttaaaaatgtgttgtcaccctgatgtaaagcccttcaattgctccccaacatacttaaattttgaatcttgggattttatgtcccaagacccttccgcaaagtgtggtccctgatgagtgctccatcttcacctgcccctactttgcctgccccactctgcccaaagactctagcctcactggatacctttcagtttcagaaactgagcctatctaaaaatatgtctcggccaggtgccacggttcacacctgtaattccaacactgggaggccaaggcaggtgtggatcacctgagctcacaagtttgagaccagcctgggcaacatggcaaaaccccgtctctacaaaaaatataaaaattagctgggcatagtggtacacgcctgtagtccccgctactcgggaggctgagataggagaatagcttgagcccaggaggtggaggttgcagtgagctgagattgtgccactgcactccagcctgggcaatagagccagaccttgtctcaataaataaataatcaataaaagttatgtctctgtcttctctctcttccctatctgattgttcccccgctccccacctctcccccaacaggcacatattccgcatccttctgatcttgcttaaagctatcttccccataaagtgccttccctgtgacacacccacatacttggacacgtcatttccatttcccctatgggggaactctgctctttctcttcatagcacttattactatttgtagttatccttttgtttgtttactggtttagtatattccccttgctggtttatcagttctatgagaacaagaaccgtgtctatctgggttgctcctgcatatccagaaaagaataaagacaacgtggctgccaccatactttcaaaggcaccttaatggcatggaaaagcatttaagataccatgctatgtgagaaaacagtttacaaaactatatgttgtataagcaggaagatgccaaagttttgaatatgtacattttttatatgtctagaaaagactgtaaaggaaataaatcaaggtattaacaaggagggtgggattatacagtttttatggataatctgaggacagaaaaatacatacattgtagctaaaactggataaccataaccatcgggtgaaaaaatggaaaacttgttgtaaggataaagaataaagtgtgattatcaacgattaaattgatttaataaccaaaacagaactaagaacactgactatttggataagttgtaatacatttgttaatatgtcagtcagctcacattacagtgatagtccatttagttttaatagaacacaactgtggagtgaaaaacgttagcctaggacagtggctccgagcctggctgcatatgagactcacctgggcactaaggaggcttaataaatcaccatctccagaagacagagtccggggaatctgcgtattttaaaagctgggtgatcatgacacaaagctggatttgggaaccccagcctagggtaaatcaagaagttgaagaagaggtttcttttcagtaagagtttcagataaaataggaacctgagaggtggagatgcaaacagtaacagattctgccaatagcagctgcctaccacaagtcaacaagcagtcataaattgcacactgtgtggaaaaatgcactcatcatgtttggtttgttcaaccacacaaacaattcaaataccaagggcagtaatatgttttagagtagcaccttacctacttagaactcagtttggcctacttgcctttccagccaaacacagcaaagcaataaaaaatacctctcagcagagaagataaaaaacagacatcttaaaactcttgccctacgactgatatacccaaggtaacccctcagtcttcattacaacatattaactccttttttatacacccttctaatgagctcggctgacagccaaaacccagagaggattacctttgtaaattaagaggggaaagggaattcacggggaggcacacagaaagcaacgatagaaactgaaccatatatttttaaaagttaatttagatcaacttagtgtggaacaaaacattacaaatatgacagtaaataccaaggacatgaaaacaactttttataactacagtcatgatgatctaagtcattaagaaaaagaattaaatcacattctttatattctgcttaaggaagcaaaaatgaaaaggcacgaacatctgagtgccctctatgtgtaaagaacaataaacaacccagctattatctcatttgatataataatcttgtagtgcagaaatcagtctcattttaagactgagccattaaaggctcagagaactgaagtagattttttaagttttactgtagaaggtagccatagccatgttgaactttgaataactgaaatatttcctttgctcattattttataccatactgccacttttaaaataattttggttacaaacatttcttcctttttttttttttttttttttttttttttttttttttggtgtttgcaagaataaaagccttctggaaaaaaaatcatctaaaacagttgtttgcaagctgtttttccaatgtgatagcattttttcccaaatgacatattccttggaaccccactatgcaggagcagagctgctctgttaaaagcactagagtgccagggcctgaagccctactccacctctacctgtaatccaagactgctcctcaggcacctccatgacccaggacacgacagattacagatttttttttaaagcaccaatctaaacaagcttagtccctagatttgctgtgtaaaggcatgtcccttagaaacacttagcaaatgacacaaagctatataaaggcatcacaatgctgtgaaaagtttggtagtatggtaaaatgtagttaactggctaaggcaagcaacatcatgagactgctcaagattacagcaccactaatgtttcctgctttgttgtacggtgtctagcttcacatgtctgagttctacgaatgaaaaaaaaaaaaaaaaaaaaaaaggagagaaatgtctaccatttcacaaaggcccaaaatctattttagtggtttttccaagagcaatggtaatttcatttttcctgcattaccaaaaactggagttattacagaaaaatcagattatatacataaaatagaatacattaaaaagcatacataaaatatagtaaatgcatagttcagccaagaatcaaagatgcagaagtactatgcatttatttgtttattccgtgatagaggtgaaagtattttctccttaatgcctggaaataagccttgggagataagactttgtcttgcccttagaactttgagtgtagaggtaggacataaatataaaccgataggaaaggttgaatgcaattaaaaaaaacagttgtactcactgacatttaaactattctagacattttttgaattgtttataggtttttgtcttaataagacggaacacgggataagatggcagaaacaggttaactcaatctcattatcaaggactatccttataataaacttaaaatgacctaaatatctgtaaaacccaaagctgatatatgaccaatgatggggtttatccaaaataaatatgttgttgggtttttttcatgggatttgacttttaattgactataaaatttatcttgactttatactggacacaaagcaacagtctgagatagaaccatttgggataacccggcgttgctacagatgatcctctattgtacaagttactcaaagccgactttgtggtcagaggcgaaatttgtttgcttcattgttttagattaagccatttttttttgacaaattcatttgcttcttctgcatatgtgaaccttgtgaatatacagtaagtggtaatgggttttttcccaagacttaacaatataactgtgagagatatgaggagaggaggaataaaaggaaagctgtgtttgttccttggtgtgtttatccatctattccaggaggttcttttagaactctgaactggcctgtggctttttctgaaaaacctatgttcaggagtaaacaatctttttattaaagcagaatagctttactagagttaatgctttaatctcattaaagtgaaatccatttctatattgtgtatcaaggagcagaaatgtgggaaaataaaggcaatcccatgctgggataattgtaactagtcccatgtgggcagctgtgcctggaatacaaactgggatatcttcaggaatgaggctaggacaatgaggagcctggaaggtggacaaaatatcaagaggaactagcagatgttcttgattcccttctccatcaactgaagtcacttactggaacccttcacttaaaaaatgatctactttccaaaaccagaccattctatttcaataagaatgttgaaaaccatgattagagtcatagtctggctctctagggtctctctttttatttttcatttttttacagacaaggtatcactatattgcctaggctggagtgcagtggctattcacaggcgtgaccatagtgtcaaacccataggcttgagcaatcctcctgcctcagcctccccagtagctgggaccacaggcatgggtcattgcacctggctcctcagtaatgtcccttaaacccaaatgttagggccacagtattcaccacacacactgggtgctgtgtcttggaagttctgtaattgagcataaaataaaagaagaaaaaaaaattctctctctcttctagacccaaagataaaccagagacacaatttttaattgagcaaagttttcgtcaggtaccctcccctctctgtcatcaggacctgcctccccaagaatgaactaaccttatactacctgctgcccgtcccttcccacaagggttcagttctctatcccaggtctgccgtatccctgaacagtaacatactgtaaagttatttctcaaaaatgaaattctctattccttattctaactgatgccactgaggcatgagaaagaaattaaccagactgagcagatttacactaacatgcttgtgctgcattagaagtatttgactttctaaggggattcttatcaacctaactcaatctctagttgggagaatttggggcagcataagacaagaatgaaagaagtgcagacaatgtgggggaaaatatttttgagcaatggaagctggctagcagcacagccagcccacgcatgcttaaagtgagtggagagagaagaaaagaaggccaggatggctcaggccacagggcagggggaggaaggactgtttccaaatgaaagactatctctacttcaacaagggtctgctgacattctacctcttccatagggcattttttacctactcccaatgccattttttctttttctgaattccctcataatatagtacatacatatagacagctcttaattatattgtcatcagttctcttttctaaaaatatgatatattgattccttctctgtaggaagcccttaaaagaatggattgtcttgggaggccaaggcgggtgaatcatgaggtcaggagtttgagaccagcctggccaacatggtgaaatcccatctctactaaaaatacaaaaatgagctggatgtggtggcaggtgcctgtaatcccagctactcgggaggctgaggcaggagaattgcttgaacccaggaggcggaagttgcagtcagctgagatcacgccactgcacttcagcccaggtgatagtgtgagactgtctcaaaaaaaaaaaaaaaaagaattgtctgtgctattcatttgagctcaatcatatttcactttatattgatccatttattaaggtatctcttactcccaattaagctatccctcaaagagtaactttattaaaagtaacccccaccaaagtacccaacccagcactaagcacactgtaagaattcaagtagttggccgggtacagtgacccacgcctgtaatcccagcactttgggaggacaaagcgggcagatcacctgaggtcaggagttcgagaccagcctggccaacatggtgaaaccctgtcgctactaaaaatgcaaaaatcagctgggcatggtggcaggcgcctgtaatcccagctactcaggaggctgaggtaggagaactgcttgaacccaggagatggaggttgcagtgagccgagagatcatgccactgcactccagcctgggcgacagagcaagactccgtctcaaaaaaaaaaaaaaaaaaaaaaaaagaattcaagtagttgctagctttaataccaggagattatatgaaaaacatatagggtctatagataatgaggaaattggttatagatttaaaaaaaaaacaaaaaaaaaactctagacttaaagtctattacctagcaatagtgcctagatgttacaaaccttcacggaggctgagaacagtgacatgcagaataaaatagtttagaaatctcttaaatatgaatatatttcattttccaaagagtctaaaacgatttctagaaattaaatagtgatacctggagggaatgtgattatgagaatgcatagggtgatagttacagagtgaattgggaatagcaagggcatttttggttcacagggctggaccagggaatggagcagagacagaggggtacccactgagtatctactatgcttcagccaccaccataggtatttgacacatattttaaatgtgctataatttcacaagaacacatcatctttatagatgaaaaaactgaggctcaaagaagctaagtcacttgtccaaagtcacacaggtggtagtaaaggaacaaagacaagattaaggtccagatttgtctatttcgtgttcttgcactctctgctaggtaatctgaattccctagtttgcgccattgcaaactttcatccttgccccccaaacaaaatcaaaacaaacaaaaaagacaaaactttgtcttagtgagggaggaagaaatgacaaggaagagatgaaaatatctagctctctagcagttatggggtcagggtagggaggtgaggccattcgggaaggattcaggaagagttagcattagttgagtgagaattatataccaggcacttgctgaacatgtgatttcatctcaataaccctaaaaggcgatcattttacatataaggaaatgaggcttagggaagcctatggtaagagaagtatgctcagctgaagctgagatttgaacttggtcatttacgtctcagagcctgtgctctttccatgattccctattggaagcatacttttgattctcttttcccacaaatgctcaaaactaaagtttggaaaacattgttctattcaagagatcttggctgggttcggtggctcatgcctgtaatctcaaaactttgggaggctgaggcgggcggatcacttgagctcaggagtttgagaccagcctgaccaacatagcaaaaccccatctctactaaaaatacaaaaaaaaaaaaaaattagctgggagtggtggtacgtgcctgtaatcccagccactagggaggctgaggcatgagaatcgcttgaacctgggatgcagaggatgcagtgagccaagatcgcactaccgcactccagcctgggcaacagagcgaggccctgtctcaaaaaaaaaaagagatctagccagtaattacattgcagttgaactgaaagaagcctgcttcctacaggaaataaaactgtcatccaaatcaaggcatctaataaatgataaaggagagacatacaatgcatattttaaaatgctgttaccctctgaccccattatgaatatagttggcatttttataggccatgtcggtgaggctcatgaacaggtaatctacccagcggagctggagccactgctgacagtaaagttccccgacttagcagtggctgggcaataatacaatgacccaaaccagttccagtggcagcaccacaaatgggtactagagaattatcattaaatgaggtcactcctagagatagtgtccattttgcttagctgactcacacttaggtgagaatgtcaacgaacagctctccacatagagctaatatggagatcactaaataaacacatttctagctatatcagattcaacatttttgtctcaaagttaagcaaaaagccaaagtgtatctctttaatgtaaaagtagttcccaaataaaaaaaaaaaattagccaggcttggtggtgtgcgcctgtagtcccagctactcaggaggctgaagtaggagggttgcttgagctggggaagtcaaggctgcagtgaatcatgattgtgccattgcactccagcctgggtgacagagtgagacctcgtctaaaaaaaagaaaaaagaaaagtagatcccatcagaacctgcaatgaaatgaaccagtagcaacttctaagtgcttgattccacccacatctggctctatttgggaactaaattcagcagaagtctccagggtcaagaaatgaccctgaataaaaatagtctcggaaatctgtcacggagtaggaaaggaaaccaggcggcagggtgattcactccaaatggcagctccaaaacccaaattcccatttttgtcccaatatgaagccaatgtacaaaacaggcagagagcaaactgtccttttccaaaggccttcaaaagaggttgccaaagaatttcacatggaagccaaaaagatttagtgtgccattcacctctcctataaatctaactagagctatttctaactagagccctgaaccaatggcaggtttacatttacttgaagaccacccagggtatctatgggtttttttccctggcaagcaagagacaccctttgtcccaccaaattttccaaatgaccaaacagccacagagaaagaatacaggggtggtgtggtgagtatgtgtgtgtctgtttcctgcctttcttctaatctataactcactgccccaacacacagttaagttctattaaagtacagtattttgagaagattgtctgctaaaaaaaaaaaaaaagaaagaaaaaaaagaaataattccattggttgaagaccaatcagccaacatttgagtactcagttaattcattttaagatgtattaaacatggggaagggcaaattctgtagcatcacagaaaacgcaaaaggattaaaggtaggtttgcttcacagccactcacttgcaccttccccttccaaagccttgcattttattctgcattcatgatttacattctttttcttaaaggtggttgcccccaagcattatgaggttcaaagcaccagaaaacctggatctacctctgaacaggctatctgcctttgaggattccataggttggtgaggaatatgaatatgataaattctctgttatgaataaatgtccatgtatcctgagagcacatgagaatgtgacattgacctgttttgggggattgggaaagatttctcacatctggtcttgaaggatgagtaagagtatggcaggcagggaatgagggcagagatgaggaaaggaggacattccagggggtgaaaacagcaagagccagtggctctcagctagggataatattgcatgcatgtgagcacaaagacacccacccacacacaacccccccagggacttgtggcaatgtctagagacatttttggttgtcataaatgaaagaggagtggagttgttgacatctagtgagtagaggccagggatgcttctaaacatcctacgacacacaggacagcccctacaacaaagtctaaaatgtctaaaatgtcaatagtgacaaggctgaaaatcccaggtctaagcaaaggtacaaaagacatactgtgttagattaaaaaagagaagttgcatggagctttggcatgcacagtgcttcagatgattgcttttatggaagacaaaacccagtaagaaaagagagggtgaaaaattaaatttctgagaagccaagatatcagactgaatagatgctttattctcaaaacaggaaccaataacaaataaagttaagaaactggacctctggaagtctaacgtatatttcattgtcctataaaatggaaagcatttctgtcaaggacaccgtccgtggctcaagtccactcctgagcagtagcctgcattcttcctttcacgcacatggctgagagtgaggagtgtgcggagtaaggagcacgccgaggagcagatgcaagcagcttgccctggcaggactctcagagggagggtgcaaagctgatgttaatgctggaagaactcacgtataggaatggcccatgtaaggagaaaaggaaccaatgagctccacatccaaaaaggaagtggctacagagaaagcagaacatggtaggacagggatgttgtggttagggcttcaagtggtcatcagggttgctggcaggaactgctcctgaccatggaagcaggcaggactcatacagaggtcttacgcctgagcagagacccttggaaattggaatgaggaacttatcaccaccacctccatctccaccaaaaagtcaaaagaaatatcccccaacaagagacttctgggagggaaagaaggagccctcacaatacaagcaggttttgttataaagcaaggaatataaattgaagctccttctcagatattccagggttttgttagaacacaagcaggttttatttatttatttattttgagacggagtcttgctcagtcacccaggctggagggcaatggcgcaatctcggctcactgccagctccacctcccaggttcacgccattctcctgcctcagcctcccaagtagctgggaccacaggcacccaccacca[187 bp omitted]tctcagatatcctaactcgcagtaatccacatcactcttttactcttgccccatccagacacacatctaggtcaatttttttttttttttttgagacggagtctcgctctgtcacccaggccggactgcggactgcagtggcgcaatctcggctcactgcaagctccgcttcccgggttcacgccattctcctgcctcagcctcccgagtagctgggactacaggcgcccgccaccgcgcccggctaattttttgtatttttagtagagacagggtt[145 bp omitted]tcaattgtggcagttgtctaaaaatcaagctttagctccaagagggaaaaagaaggccagattaatagcaaaacaagaagataattctaaaaggacaatgccacataagcttttaaaaaaaaaagtaacaagcatttttccctctctacaaaaaaatgttgtcatgaaggaatgtactctgtacccagcattatgctaggtgctgctgttgagaaaacacagacccatgaagcacctgcagccttgagtgcttgactattacatgacttaaaggaaggaagcaggccttgcagaagagccaggtgggaagggaggacaggacattccagactggggagtaagagcaggaactacagcttgggagggcaggagtcatgaggtacaagcacacatgggaatttcactcacacatccatatataccaatggaccaaacacgctcaatttcagctatatacaaccagaaatatgtgcccaaccaccaatattccaggagacaaaaacacttcaacatcacagaacagcacctggattacgcagtggtgggtttctggtcaccttctgcaaagtgaaaggaaagagaggactgttttctgtctgggtcagaatttatagtttcagaggagggtaagggtgctaccctttgctggcactgtgtttatggctacagggaaccaactattttaatgtataagtaagtcatgaacaatcactgatctgtacaatgagaaccacagccagttctcagagtcatcaaggacacacagatgagatacatacaaatacatatacatctgtacacccaggattttgaatgatgtggagattgggtataaaggtagacctaaaaacctgggccttagccaatggccatatggagagctggtgattcctcccacctctccacaacaccaaccccttcccttccaaacaacttaacttattcactgtcacccagagtcagctttcatgccgccaacccctgctcatgctgcttaatccacctggaatgctctccagccacgagtccacctttacaaatcctacccatcctttggaactcagctcaactcctctcttcctctataaggtgttttggagtcaacctaaggtatctctctctcttctgaacttccagaacaatttctataattacttgacaaataatcacctaagctttataaggcttttatcttctctttcttttcctttctttttttcttttctctccttccttcccttccttcctctttatctgtctctgtctctctctctctctttgtgtctctgtctctctctgttttctttcttctttttcttctaagagacagggtcgtgctctattacacaggctggagtacagtggtgtgatcatagctcacggcagctttgaactcctgggctcaagcaatccttctgtctcagcctcctgatgttgttttcttgaactattctttaaatcaatagaaaattccacctttctccaggtcttcattgagatgtcacctcttcgagaggtaagcagcacatcttgtagttctttggatactcctagcttatctcctagagtaccttgcacacagtagaattaaattgcagcattcggccgggcatggtggctcacacctataatcctagtgctttgggaggccaagatgggaggattgcttgaggccaggaattcaagaacagtctgctcaacatagcaactctaagggcccatctctaaaaaatataaatataaatataaataaattgcagcattctcttctgtacacataggagttgttaggctcaccttagtaatctattttgagattcaaacttcacacttaagagacttaatgctttaaaaaaaaaagcagaaattctaagtgccttccctcaatttactttttaaaaaccacaagagttttaattctattacagaggagtagtcctacaaactaatgtagccctgttagactctatgccttcaatttcaaattctgaaaattctgcaaaagctctggctaagcccatgtatttgctggaggtgaaagatggaggttaaaatgaaaggcttcatattcaactgttactacatggtcttgtatacagtatgtacataataaatgtaccaatgtctgaaaaactgaaatgattataactgagagtgacaaaattataaaggcatttctcaaagcacacaacttatttcctgtgggggagaggagtagaatctcttaatttaaaacaaccttaatctatgaaattgctatgtaacttacccctttatctattttatgtgcacttgggaaaacttaaaacagttttactaatatggatttgccaggcactaatctttgaagtatgtatacacatattattaataattcatttaaccctcaggacaaccccaatcctacagacgggaagactgaggcacagagaggttaagtaacttgctcaaagatcacagcaagaatgcagtggaactagaatttgaatctcaacagtctgactcttaatcactatgataatgggtattggttatagctgatgtagaggtatatcattttgattaatatttggggtgatttctataaaagttgtacatccaaaccttgatcagaaatgtaacatcctatcattatgctggtatgtaatcaacctgattgacccctgtcaactggattgacaggggtagttaataatgaaattagggttaagcacccaagcctagattatgactttcactttataagcttaaggaatgatgtttagctataaaccttagaagaaatgcagccaaagcttgcagggaaacatacacacgcacaccaaaactcagctattttgaaattccacttactttaatgtttaagtcaaactactttaaaactgtttacatattactctatcaagggtgaaataatcgcatgtaaagggctttctaaaacaaatccacatcttggaagcccattttggggcgttgagttgtgactacgttctcaaggatgttaataacacaagagctccatccactaactccttgaaaaaaaccaaaaccatgaacgtcttgtcaaattcagacagtttatcttggcactggcaagtacagcagtctcttcgatgtctggaaacgtgtctaattacgtttagagagtaactaaaaaaatagccagtgtcccggaacagacagctcagggatcactccatagcatcctgaatgacaggatggaactacgccaggaggaaaaaaaaaagaagggcgaagaaagaaagaaaagaagcaagtgtaaagccgggatgagacgccagcctctctccaaaataatcctccagtcctcctagggccttcggggccaccgcaactctcgttcaagttatttcccttcagtttccatgaggtcaccggcccgcccacatccctcacctggcgcggggaagcgcgccctcccgcgcggcacaccctctgcacctaaaccccggacagcgcccagggctcccctctcagggaagcgcggcccttgagctcgacacgccccccgcaccccaaagcggccgcaccccaggggcgtccgctctcgggaaagcgcagccgcggagcttggcagacccccggacaccgcagcccggccgcgcctccatccctggagcttgggcgctcccgacaccccggatccggccgcgccccgaggcgccccctctcgggaaagcgcagcctcgcgcccctgcgcgcggccgctccgccctcacctgagcctgaggttggccatgaactcgggcatggagacggtgtccatcagcacgaagtctgccttgccgaattccaggctctcctgctccgccatggcgccagcgcgggggctcaggtgggcgcgctcgggcctccggggccgctccgtgggcccgcgatgagctcgggaggggccggggcgaggccgcgccgcgaggctacggggagggggcgcgcacgccgctcggcgggtccgggccggacagaggccgcctcgctgctcctcggcgccttctcggccggcgcggctccgaacgggacgcacccgacagtttccgctcctcccgccgcggctgccgggcgctgtaggggccgggacaccgagacggagacggcagcggctggtcccgcctccagcctggggctcgtcccggctccgccccgcccgggcctcccggctccgcccctcccggcccactgaggagcccgccccagccgcggccctggccgccgcctcttcacctgggcggcgcgcacgcgcgggtgggcggcggggacgcgcgctgggccgggcggcggcagctgggtggcagcgccccctggggacaggcgctgggatctcaggcggccaagaggatggccgcctgccgcccacacttggtagctgccaacaaagttagaaaagtagttcgtggagcttttcgcgaggacaattcattatgattctgtcaccctgctccaaaacccactcccgcctctctactcacaccctgcccattcttgaagtggtggttcaagcacagactgagaggtaataataatggctaacatttttggggcaccaaaaatgcccagagctgttctcagcgccttagagaacttttaagaaacttgccatacgactaggaagtggagcagctgcggtttcacgcaggtcatttgacttaggagccgcagcgttcaaccacgtctgactacctccattcttcagtggcccattttctcttccactcatccgagcatgtcatcagacattaccttatatgattattaagtttttaatatatctttgtatcatctctccaggattattgcggatgtcttgagcatgggaccattctttttgcatccaccaaataactattgtactactttgcatatataaatatgaaatccatactggttcagtggaatgaagtgagttgtaagtagtctccaatttattgatacattggttgagcttggaaaattctttttgaactcaatgtattttcccaaagaaaatatactacaaatgactttctttcttttttttttttttttctttttctggagacaaattctccctctgtcacccaggctggagtgcagtggtgcaatcacagctcactgcaacctcaaactcctgggctcaagcaatcctccagcctcagcctcctgagcagctgggactacaggtgtatgacaccatgcccagctattttttttaaataaatgactttctaaggtatctacatttattcagtcctgtgtttctgttaggacatcttctattacaaaatctacgaggaaatctagaggcctccaaggacctggctgggcttcaactctggctgagtttgagatgagtaaaccagactgaaggaccttgcccaaggcctgcttcagctgccagccacccacacttgctaagagaaaggaaaggagctttgtcacctcctgagggactgcctctgccatcagaaaaccaccccaatccctggcaccagcagagctgggttgcatctgactaccgttagcagctgtccttcagaaggaggagatccacctgtctcgatatcagtgtcctcatttgtggaataaaagctctggaataaggtaggactgtcctatggttgggtcatttgtggaggtgtcggtcagtggctaagtaggttattgcatagggtatggttgtattcctaatgtttgtattggcatgttttaacataagcagaactgaacttcaagaaggaaagaaagaaatctcaaactgtatgcactttggagcatccagggaccacaccccaaaaccttttggtaaattatatatgtgtgttccctgagctctgtaggtgttaaaaattagggcaaaatcccaggtaccaggaaaagaaacatcacggcttgcagatgatgagagagttgcagaaattgtacagtggttaggagctatggtgggatacaatgtggtttccaaatggccaaagtaagagatcctcattttaatcaacatcttatataggaacccaacatataaaacacatatacaacatatgcaaagggtattttattaatttcttgtataagtccaaattagtataaaattaggcattgatgctctcatgatgaacccaaatctgctcaatggggctcactattagcctcaggattccagtttacttttgtatgttgttttcattgtactgtgtcaagcaaattcttgtttgtataactaagcagtaatttgttacccatacaactttacattcagcatttctaggccaatgtgcagttacaacattattaatcaatgacacacttgagcaaagttcaggtatatgcacagccggcaggagagactgaatactctggtctgcattcagtcaaggtaacctagagcagattagctcattatgaatgttctttgtgataaaatttgaatagaaacacatttggagatgcatgtttttgttacagtttaaaatatacaaaaaataaaacaaataaaagtttatatccccaatcatgagacacacagacaccatgagcctcctgatatggtctcctgaaaaagacacatatcatttacctgctaaaaatacgtaaatggaatctaatcatgaagaagcatcaaacaaactcacattaaggggcatcctacaaaacaattgacctgtattcttcaaaaatatcaatgatgtgaaagacaaagaggctgaggcacatcactattaaaggcaatgggtgattctggactggatctccaaccagaaaaatgtaaaggacattgttgggataattggtgaaattcaaatatagacgcgatgttagatagtaggatagtatcaatgctagtttttctgaacttgatcattttactgggattctgcaagataatgtccttgtttctagcaggtatctgctaaagtatttaggagtaaaatgatgtctcgaactgtttggcaagaataataaaaataataagatgaggaggtggaaggagggcgtgcatatatattggtagacatataaatgattaaagcaaatgatgcaaaatactaacaagtggtaaagtcattaaaaatatatgggacttttgaggggattttcttttgtactatcctcacaacttttctgtaactttgcaattagtttgaaatttattcatttattttgagacggagtcttgctctgccgcccaggctgaagtgcagtgacacgatctcggctcactgcaacctccgcctcccgggttcaagcgagtctcctgcctcagcctcctgagtagctgggactacaggtgcatgccaccatgcccagctaatttttgtatttttagtagaaacggggtttcaccatgttggtcaggctggtctcaagctcctgacctcatgatctgcccacctcagcctcccaaagtgctgggattagaggtgtgagccaccacactcggcctgaaatttaaacttaaaaattaaatagtaatctaaaactgtgctaaataaaaatttttaatttaaaaatattaaataacacttagaaatcaaagtcacatcagaattttgcaaaccttccagaactgaagaaccagcagatatttttgaaaaccctggtccagggtacctcttagctctatttggcatagatgtgctaggagattataaacactgaacaggtaattctaaaaacaaaaataattagatgtcaaatatacccatatgcccctgagaaggtgcatcctgttctctgcctgaagttctccccgccaccccacccctcactcctatgacctagctaacttccgctcatccctccgctctcagtctcaacatcacttcctccaagaaggcttccataatctcctgagtcagaattggctgttcctcctctgtgcctcctgcagcatcctggaagtgctgcccccattacagtactaaatgcccttgagcctactgtctgtctctctcactcgtttgtaagggccatgagggctggaagctgtcttttctggtttttgatgtaaatgtaattctggcacctcctagcatagtgctaagagatgaagtgcttaataaactgttgcttgataaatgaatatggaatggtctgtgaacctatgggtcataaaatgtgagactgtaaatccaccccccttggtagttttctgcattgcaaattagtcattgtacaacattaacctcagtctcatctcctgccccggaagcagatctcagggctgtgtttatttctcccctgggaccaggcctgcacactgtgtgttcacactgaacaaaagctactgttccaaaaacccttctgtagttaccagccactgcagagggtctactcttgatgatccacgaaaatcaaccctgaattttccaccacaaatgtttattcccattcaactttcccagaatgtttctgggctgccctgccctccctccctttaccagaggctttgcatccaaggaagacaactctttcagcatgagtctggcaagacagaaataagacagctaggaaaaaaacaacaacaacaatagtcacacagcatattcaaagggcattttataaatttattttataatcccaaattatcacagagcagaagtagaaaggcaaacatatgttgcaaaataacttcattacgtacttacagccatatagaaatgatttggaactctgccttagaaaatatccaaaacatacctcctcctctttactgcatgagcctggatttgaactaagaatgatacatcagaaatagcatatgtacttttcatggcttctgaagccaaaaaattctttaagtataaagagacctgacagttgcctctctgatgtcattaatgacttttacccacctgtagagtcccctctctcccctaacccccaacctgacactctagacatctcacaggacaaaggaaagggagttttcatggcagggatcactaccctgaaccatcctgaaagtccaaaaagtgatttttaaagttcatcttctcacctctaactcttaaagacagaagactagcaagccaattgctaacgacttggctttgagttctagacacttcttttctccattgttcctgtggtccagctgtgcttacctgtgatggtgttgagttggggactggagtgactgtgataccacagacagagctccttttaactaatcaggctaagcacagagggtgttgggagatgtcagctgaagaggggaggagatagaggaggaagagaaggaaggagccggtactacaagggtgtcggcagcaagaggagagtagcaaggcactacttctcaattttaggtttcatcatcctttaataaaaacgtgtggacttccggctgggcacagtggcgcatacctgtaatcccagcactttgggaggctgaggcggatggatcatgaggtcaggagttcaagagcagcctggccaacatagtgaaaccccgtttctactaaaaatacaaaacttagctgggcatggtggcacgcacctgtagtcccagttactcaggaggctgaggcaggagaattgcttgaacccgggaggcggaggttgcagtgagctgaaatcgtgccactgcactgcagcctgggcaacagagcgagactctgtctcaaaacaaaacaaaaacacttgtggactttttctcttgagacaaatatattaagcacatacacagaacagtttgcccacgggccaccaattcacctccacccctggaagtaacctctcttctacgggccccaagttaaggactcctgagctaagggaaagatcacaccacaattcctgattattttggaatggagaagaattatagcaagccatcactgtcagtatcctgtgagtcaccagacagggactgtcccaataactcatccccctgtgtgggcagacaagccacagatgtaaggccacaggaaagatagaatcagagggtggaggcggacaacctggaactgcctccagaattattcctgcttgccatgacgtagtttctgactataaacattcaaagggaatgcatcttctttaggaattacagaagtgtttatcactctgggttggagttggctgttcaggcatatccctaaactctctaggacaggggctgtgcccaactcatccttatatctacaacccctcaaactgtgcctggtacccaacaggtatttcttgagtgtagtaggtgaattaattagcaagttaattagtaaatggatgtgtgtagatgtattgttccattttaagggccatatggcctttccttaagccccaaaccaaataatcactaaatctcaagctattctgccattgaaagcagtcctagagctagaaagtttgggagtgtgataggaacccatgagagggaaaacaaaaagacatatcacaatctattcatggattgatggtgtcttaaggcag[145 bp omitted]tccgtctctactaaaaatacaaaaattagctgggcgtggtggtgggtgcctgtagtcccagctactcgggaggctgaggcgggagaatcacttgaacccgggaggcggaagttgcagtgagccgagatcgtgccattccattccagcctggtgacagaataagagtccgtctcaaaaaaaaaaaaaaaagaaaaagaaaaagaaaaatcacttagagatcttgtcaaaaatgcagaatttgatttagtaggtctgggtcctgaaattctgctcttctaataagctcccaagtgatgctgatgctgctggttctgagaccacactttaggtagcaagattctaaggaatagaatgttgttacttgaacatcatgtttaagtatgatgatatctgtaaaggaggatatgtttggtcatatcaaacatcctcctttacagacggacaaaccgagtcccaggaagagtggctgactaactagatcaaagtgaggcagtggtagagctgagaccagaactcaaaatatgtggtttgggtcatgtaatgggtagtttccactatccagcatggacattcaattaagagattgcgccgggaggctggggcaggagaattgcttgaacccaggaggccgaggttcccgggtgggccaagatcgggccactgcactccaccctgggtgacagagtgagattctgtctcaacaacaacaacaaaaaattaaacaatttaaaaaaatttaaaaagagagaaattgcacttcgtgagatgaagttcaggaggtaaggtaagtagaagtgagggagagcaacaccctagatcttctctgggtacccccagaacttctgttcctttcccatttgtaaatattgggatgatgtcttcattttctctgtcccctttttctcctaaaagtttagagtagaggttaaagaggagatattgttgggattggaagaaaaccgttccaattccaagtactttgctactttgtcaggtggagggaagaaatgaattggaatggttttctttcaaacccaacaatatctagtaactagtacaagatacgataataataactagtactagatacatctactactacaatatctaatacctagtactagttagtactagtttcacctagcattcatattgggtcagtatctgcagaattgacattccaggaagagtgcaacatcatatttagggtgatggataatctgctcccccaaactgctttcctcctgccttttacccagagtttctcagtttctcaactggtaagctgcagcagtatccatctcctagggttaagatcctgaaataaaatgcatagcatgaccctctgactttttccaaccaactggattaattcttcagaatatctagaggtataaataatgtgagccatgcttatatccaaatctgacaacctgaaccctgaagaaattatacaggggaaaagtttcaatctaggagatcccagaggtcatgtaacccaatatctcatccaatgcctgaatcccctctgtaatatgccacaatgtctgcacctacctgggacatttgcctcattaggcctccctcatgcccagaaggtatatctacataaaaacagctcattcatctgtaatcccagcactttgggaggccgaggtggatggatcacgaggtcaggggtttgagacctgcctgaccaacatggtgagaccccatctttgctaaaaatacaaaaattagctgggcatgctggtgcatgcctgtaatcccagctactcaggaggctgaggcag[136 bp omitted]actgcccagactcgctgcatgccctgtatgccaaccagctcccaactgtcccatcttcttgttcctcattatccctatttatgagcttgatttgtcctttggagcttatatgccaccaaggtaggaccagcttgaagtgaattgtaatcaagctggggggccaaggtcagggccaggtagaaaggagcctcctacttttctcaagttgacctgtctttagagtttctgtccataaaattccaactcttatttcaccgatctttttgaggtccagcgtctcaatgtctcagtgtgactttgcttatctcctcacagtgtcactttctcttagtgttctcatcctttccaagtctctaattagctctcctgaactgaataggattctgttcagagtagcatcctccccatactcaggaggcagtggtggcacagtggtacccaaactttgggtacctgcaccagaggcttagagatctgaattttaataagcagcccaggagattctgctgcaggtggacagggggccaaccaaacttggagaaatattgaggggaattttggtgtcatacactggagttcaagtcctaggtctgtatgaccttgaacaaattagctcatctgcgtaagcctcagtttcctcacctttaataaagatgagaaaaacccacctcgaagtgtgaagtgaggtgacatctataaagtgcttcatgtaatttaaggcgggcagtaagcactcagtaaatacaagctagcattgctattagtgcaattgcttctgttatcttcagaatagggaattattagaagcagataagttgtagcatgtcctttttagcagactgagatttctaattgatgcctgtgagcttctggtcacgctgtgattttcctctatgtgagttttatgattcctgttgatttattaccatttacatgtatagccctgggccttgcacttagtaagggatcaaaacttcctctgcgtgtgtgtgcgtgtgtttgcgtgtgtttaaaataagagacagagtctagctctgtcagactggagtgcagtggtgcgatcacagctcactgaagcctcagactcctgggctcaaacaactctgctaccttagcctcctgagtagctaggactatataggactacaggcacatgccaccatgcttggcttatttatttatttttttaaattttttgtagagacagggtctcctatgttgctcaggctggtctcatagagacagggtctcctatgttgctcaggctggtctcaaactgttgggctcaaccaatcctcctgccttggcctcccaaaatgctgggattagaggcataagccactgcacctggcccttcctgaatatatttgaatgagtgaattccctctgtgctacaccctcactgcagcatcacatttcttcttcccattccccgaatgctctccagcctcctcctgacataaagccctggtttacgtccctcctggcacaactcttcccatttccccattccgtgtgaagagtgccatcccatggagccttgattgttacctgccaatttgtatatgttatttgcattaaaacttctgattcacggaggagccaagatggccgaataggaacagctccggtctacagctcccagcatgagcaacgcagaagacgggtgatttctgcatttccatctgaggtaccgggttcatctcactagggagtgccagacagtgggcgcaggccagtgggtgcacgcaccgtgtgcgagccgaagcagggcgaggcattgcctcacctgggaagcgcaaggggtcagggagttccctttccgagtcaaagaaaggggtgacggacgcacctggaaaatcgggtcactcccacccgaatactgcgcttttctgactgacttaaaaaacggcgcaccacgagattatatcccacacctggctcggagggtcctatgcccacggaatctcgctgattgctagcacagcagtctgagatcaaactgcaaggcggcagcgaggctgggggaggggcgcccaccattgcccaggcttgatcaggtaaacaaagcagccggaagctccaactgggtggagcccaccacagctcaaggaggcctgcctgcctctgtaggctccacctctgggggcagggcacagacaaacaaaaagacagcagtaacctctgcagacttaaatgtccctgtctgacagctttgaagagagcagtggctctcccagcacgcagctggagatctgagaaccggcagactgcctcctcaagtgggttcctgacccctgacccccgagcagcctaactgggaggcaccccccagcaggagcaccctgacacctcacacggcagggtattccaacagacctgcagctgagggtcctgtctgttagaaggaaaactaacaaacagaaaggacatccacaccgaaaacccatctgtacatcaccatcatcaaagaccaaaagtagataaaaccacaaagatgggaaaaaaacagaacagaaaaactggaaactctaaaacgcagagcgtctctcctcctccaaaggaacgcagttcctcaccagcaacggaacaaagctggatggagaatgactttgacgagctgagagaagaaggcttcagacgatcaaattactctgagctacgggaggacattcaaaccaaaggcaaagaagttgaaaactttgaaaaaaatttagaagaatgtataactagaataaccaatacagagaagtgcttaaaggagctgatggagctgaaaaccaaggctcgagacttacgtgaagaatgcagaagcctcaggagccgatgcgatcaactggaagaaagggtatcagtgatggaagatgaaatgaatgaaatgaagcgagaagggaagtttagagaaaaacgaataaaaagaaatgagcaaagcctccaagaaatatgggactatgtgaaaagaccaaatctacgtctgattggtgtacctgaaagtgatggggagaatggaaccaagttggaaaacactctgcaggatattatccaggagaacttccccaatctagcaaggcaggccaacgttcagattcaggaaatacagagaacgccacaaagatactcctcgagaagagcaactccaagacacataattgtcagattcaccaaagttgaaatgaaggaaaaaatgttaaaggcagccagagagaaaggtcgggttaccctcaaagggaagcccatcagactaacagcggatctctcatcagaaaccctacaagccagaagagagtgggggccaatattcaacattcttaaagaaaagaattttcaacccagaatttcatatccagccaaactaagcttcataagtgaaggagaaataaaatcctttacagacaagcaaatgctgagagattttgtcaccaccaggcctgccctaaaagagctcctgaaggaagcactaaacatggaaaggaacaaccggtaccagccgctgcaaaatcatgccaaaatgtaaagaccatcgagactaggaagaaactgcatcaactaacgagcaaaatcaccagctaacatcataatgacaggatcaaatgcacacataacaatattaactttaaatgtaaatggactaaatgctccaatgaaaagacacagactggcaaattggataaagagtcaagacccatcagtgtgctgtattcaggaaacccatctcatgtgcagagacacacataggctcaaaataaaaggatggaggaagatctaccaagcaaatggaaaacaaaaaaaggcaggggttgcaatcctagtctctgataaaacagactttaaaccaacaaagatcaaaagagacaaagaaggccattacataatggtaaagggatcaattcaacaagaagagctaactatcctaaatatatatgcacccaatacaggagcacccagattcataaagcaagtcctgagtgacctacaaagagacttagactcccacgcattaataatgggagactttaacaccccactgtcaacattagacagatcaacgagatagaaagtcaacaaggatacccaggaattgaactcagctctgcaccaagcggacctaatagacatctacagaactctccaacccaaatcaacagaatatacatttttttcagcaccacaccacacctattccaaaattgaccacatagttggaagtaaagctctcctcagcaaatgtaaaagaacagaaattataacaaactatctctcagaccacagtgcaatcaaactagaactcaggattaagaatctcactcaaagccgctcaactacatggaaactgaacaacctgctcctgaatgactactgagtacataacgaaatgaaggcagaaataaagatgttctttgaaaccaacgagaacaaagacacaacataccagaatctctgggacgcattcaaagcagtgtgtagagggaaatttatagcactaaatgcccacaagagaaagcaggaaagatccaaaattgacaccctaacatcacaattaaaagaactagaaaagcaagagcaaacacattcaaaagctagcagaaggcaagaaataactaaaatcagagcagaactgaaggaaatagagacacaaaaaacccttcaaaaaatcaatgaatccaggagctggttttttgaaaggatcaacaaaattgatagaccactagcaagactaataaagaaaaaaagagagaagaatcaaatagacacaataaaaaatgataaaggggatatcaccaccgatcccacagaaatacaaactaccatcagagaatactacaaacacctctacgcaaataaactagaaaatctagaagaaatggataaattcctcaacacatacactctcccaagactaaaccaggaagaagttgaatctctgaatagaccagtaacaggagctgaaattgtggcaataatcgatagtttaccaaccaaaaagagtccaggaccagatggattcacagctgaattctaccagaggtacaaggaggaactggtaccattccttctgaaactattccaatcaatagaaaaagagggaatcctccctaactcattttatgaggccagcatcattctgataccaaagctgggcagagacacaaccaaaaaagagaattttagaccaatatccttgatgaacattgatgcaaaaatcctcaataaaatactggcaaaccgaatccagcagcacatcaaaaagcttatccaccatgatcaagtgggcttcatccctgtgatgcaaggctggttcaatatacgcaaatcaataaatgtaatccagcatataaacagagccaaagacaaaaaccacatgattatctcaatagatgcagaaaaagcctttgacaaaattcaacaacccttcatgctaaaaactctcaagaaattaggtattgatgggacgtatttcaaaataataagagctatctatgacaaacccacagccaatatcatactgaatgggcaaaaactggaagcattccctttgaaaactggcacaagacagggatgccctctctcaccactcctattcaacatagtgctggaagttctggccagggcaattaggcaagagaaggaaataaagggtatccaattaggaaaagaggaagtcaaattgtccctgtttgcagatgacatgattctatatctagaaaaccccattgtctcagcccaaaatctccttaagctgataagcaacttcagcaaagtctcaggatacaaaatcaatgtacaaaaatcacaagcattcttatacaccaacaacagacaaacagagagccaaatcatgagtgaactcccattcacaattgcttcaaagagaataaaatacctaggaatccaacttacaagggatgtgaaggacctcttcaaggagaactacaaaccactgctcaaggaaataaaagaggatacaaacaaatggaagaacattccatgctcatgggtaggaagaatcaatatcatgaaaatggccatactgcccaaggtaatttacagattcaatgccatccccatcaagctaccaatgactttcttcacagaattggaaaaaactactttcaagttcatatggaaccaaaaaagagcccgcatcaccaagtcaatcctaagccaaaagaacaaagctggaggcatcacactacctgacttcaaactatactacaaggctacagtaaccaaaacagcatggtactggtaccaaaacagagatatagatcaatggaacagaacagagccctcagaaataatgccgcatacctacaactatctgatctttgacaaacctgagaaaaacaagcaatggggaaaggattccctatttaataaatggtgctgggaaaactggctagccatatgtaggaagctgaaactggatcccttccttacaccttatacaaaaatcaattcaagatggattaaagatttaaacgttagacctaaaaccataaaaaccctagaagaaaacctaggcatgaccattcaggacataggcatgggcaaggacttcatgtccaaaacaccaaaagcaatggcaacaaaagccaaaattgacaaatgggatctaattaaactaaagagcttctgcacagcaaaagaaactaccatcagagtgaacaggcaacctacaaaatgggagaaaattttcgcaacctactcatctgacaaagggctaatatccagaatctacaatgaactcaaacaaatttacaagaaaaaaacaaacaaccccatcaaaaagtgggcgaaggacatgaacagacacttctcaaaagaagacatttatgcagccaaaaaacacatgaaaaaatgctcatcatcactggccatcagagaaatgcaaatcaaaaccacaatgagataccatctcacaccagttagaatggcaatcattaaaaagtcaggaaacaacacgtgctggagaggatgtggagaaataggaacacttttacactgttggtgggactgtaaactagttcatccattgtggaagtcagtgtggcgattcctcagggatctagaactagaaataccatttgacccagccatcccattactgggtatatacccaaatgactataaatcatgctgctataaagacacatgcacacgtatgtttattgcggcattattcacaatagcaaagacttggaaccaacccaaatgtccaacaatgatagactggattaagaaaatgtggcacatatacaccatggaatactatgcagccataaaaaatgatgagttcatgtcctttgtagggacatggatgaaattggaaatcatcattctcagtaaactatcgcaagaacaaaaaaccaaacaccgcatattctcactcataggtgggaactgaacaatgagatcacatggacataggaaggggaatatcacactctggggactattgtggggtggggggaggggggagggatagcattgggagatatacctaatgctagatgacaagttagtgggtgcagcgcaccagcatggcacatgtatacatatgtaactaacctgcacaatgtgcacatgtaccctaaaacttaaagtataaaaaaagaaaaaaacaaaaaaacaaaaaaaaaaacttctgattcactctgtgttaaagtgtgacttgaatttgtttaaaataatgagaaaaaacaaaaacaaacaaaaaacaacaaaaacaaaacaaaacaaaaaaccttctgattcactctatcatacatgctctgtgtataaatggcattttattttattttattttattttattttattttattttatttattttgttttgagacagagtcttactctgttgcccaggctggagtgcagtggtgtaatcccggctcactgcaacctccacctcccaggttcaagcgattctcctgcctc[134 bp omitted]tggcctcccaaagtgttgggattacaggcgtgagccaccacacccagccatatatggcattttaaaatagagagtttaaagatgagactggtgacttgagagtaagagttgggggtggggtgggggcatggttttgacaaccaggcaacaagcaactaccttttcctttcatacttgttcctttccagtacacagaggtattctgtttagtttttgttgtcgttgttgttaactcaggcactattcagatttttttttcagggttttaaattcaggactttgcagagtatcaaagaaataattcagaagaattcaacctacactataaataagttacatttgaaattctccagcaatgaattgatacatgtagcaattatgtagagcacatgtgtaactacaaacattgtggggctctggtgttcagttttggaaggagagagaatgcgagttagaaagcaaaggctccaaggctggctttgccactcagacactgtatatgaccctgtgcaagtcacttaagccctctgaacctcagtgtccttctctgttaagtggagtaatgctaatatcttacctcatagcgttgctctgataattaaatgggataaagaatgttagtgtggcatctgggacatagttagggctcctaagttgacggcactgttattatctgccagtcccttgcaccaaggctttgaagcaacttataaccagtagtaggggaaagagtgtctgttctgatctggttcttctctcctttgacaccctggttctctggtgtcctcttatctgttcgttcgtgtcaggctggtcaattccttgtagctgaactgatacactaattgcaggaagttcatgggctatctacaatttctcaaagttgagtcttgtagatacagtcacttcctggcatttttgttcatgctgtcacccaagttcctaattgctgttgcataaccaggtatgtgcttgcctttcagaggatgcgtttttctcctgatgcaaatacaaatacaaggcataagtgcaatgtctgtgaatagatgcctcctccactccaacccaaatcttgtgtagttgtttcaggaagctttcatagatcaataaattccatatctggttggtcattagatttacctggcctgctttagaaacatctatcttccaggtttcactcccagtcttttgaatataaatcttagtggctaagaatcatgtaataaaaacaccttgagttaggtacaataaaagaataacttctgaaatgactgttgcctggtaaattaatggccattgcatcaaagtagcctctctcgtttagagtctacacctaatcttttttttttttttttttttgaaacagagtcttactctgtcacccagaatggagtgcaggagtgcagtggcatgatcacggctcactgcagcctccatctcctgggctcaggtgatcctcccacctcagcctcccaagtagctgggaccacaggcatgtaccaccatgcccgacaatttttttttttttttggtagagacagggtttcaccatgttgcccaggctggtctcaaactcctggggtgaagtgatcctcccacctcggcctcccaaagtgctgggattacaagtgtgagccactgtgccggcctacacctaatatctattaaggattctgagcaccttcatcttctgcaggtgtgatcactaatttaattaggaaagcatacttcagcgctccctataaaacctttttggagcacacactgacctacagccagtgctctgagctaggggcctaaagattgagctttcaacatgtatttcatttgcttaaatgacctaagattccctaagaacaagactgagctttatttcccagtcaaaaagaagcatgagtgggccaactcagccactgggaagaagaggaggtggagaaagaagaggaggaaggaagcctattttagttacatggggaaaatcctaaagcaagtgagttggtgcactctttgtagaagcttagaatggccaagagaggtatcatgttagcggccctgggtatcatcttgacttcaacttactgtgatacaggagtccttcacacatagtgttcctgaaaagttatgtgccaacagcttttctaaattggatctgctaatggctgctgtcttctctcgcttcgttttctttctgttggcagcagctctgaacacctgagctcttaatgaatgtctctctcgctctcgtatctgttgacaggcaatctgtaaatctgtaaactgattctttttccttttttttgagatggggtcttgctctgtcacccagactatagtgcattgttgcaatcatagctcactgcagcctccatctcctgggctcaaatgattcttccacctcaacctcccaagtagatgagactataagcccacgccaccatgcctagctaatttgcttgtctgttttagtgggtttttattttttttagatagggtctcactacgtttcccaggctggtcttgaactcctgggctcaagcaatcctcctatgttggcctcccaaagtgttggaattatagacatgagccactgcgcctggcctaaactgattcttaaacgccctctccttttcttgtaaagcggatatttgccacctagtctgttttgtaactttgaagagtggcatagatcagttttcgtcaaatgatgctctgtatttctaatattacttaggaggggtaggcaccctggttccttcctcctgcccacccaacttcaccccgtggcataagaaattggtagaaaacaatcaggaaaatcttccccctcaaaagctgggaagattcaaaagatgtaaggagattttctgaaatcttgactgaattttacgccttcatgacaaggaagtaagtttgagtgttcacgtgtgtcataccacagctcccatattccggtaatatcatctagaatctgttgcttatcttgggaaacaaaggggaaaatgagattaaggaaagatgggagaggagagaaggtgcatgatgtgtagtgaggatatatagaacagagcttctcaaccatagccctgttgacatgttggggctggttaactctttgttgtggggttctgtgcattgtaggatgttaagcagcctctacggcctctatctgctacatgccagttgctccctccctcccagttgtgacaaccaaaaatgttcaggcattgctgaatgtcctctggagggcaagattacccccagtggagaacccctgctctagagcctgtagggctggtaggaccctctatgggagtacttgcattaagtagtcctttgtgcattccctggacattctcctctaattagtctttctttggcttgttcttaactgtgtgggcctggcaggccaccttgtacctcccaaggcttgggtctgtggctggagtcactgtctcagggcactgtaaggataaaacaagatattggttggataaatgtattgagtgtctaagtggtctaagtgcaagccttgtttgctgtgggaactcagatgaaaatgatgcagactttattgtaaagggactcacaatcctgcggtgggagagtgttgaggaggaagtatttctcaattattagaaccaggaaaactttttgaatctcacctcaagcctccctctctcctccctctccctctcatcccccatctcccccttcttccctccctcccctctctctctgtcttacacacacacacacacacacacacacacacacacacagcaacaagaagctgagagcagtgtgaaaatatgacttgctccatatgtctcatgtccaagtggagctaggattagagcgttgggtaaatgattctcagaacagcttatttttactactctggttgtctctctaacattaaacaaggacactaatgacatgtagcaacatgtgatacagggcctgacggcagagagtgccaatgttctcagtgggaggaggaacttagtaagtgtgtgtggaacacagataagggagctggcacttggggaggagccttacaggatggataggatctgaagagtgctgttgagtgtcagcatggtaggtagaagtgacagatgaacagtggggtggaggctggaaaacacagggacacatccgaggaagaccaagttttccagcctggctgaagaccacaaagaagtaacaggaagaaagagaggctgaagattgagaaatgtcaaagtaaaatgcttacttaatgtgaaatataaagtgggaaagcacattctaaactaagtgttttccatcttcagatggtgttggacgttaactccacttctgttaggaaaaaccaagtcacaaaggttgaagtgactggaattagtctgtgttatccaaacaacggttatctttctcaccagctccaaattcccgtccctctcttctttctcatcccaagaaactgctgataggtactgtggaccccaaaaatctgagataggtctcagttagcttagaaagtttattttgtcaaggttgaggatgtgtgtccgtgacacagtctcaggaggttctgatgacatgggtccaaggtgttaggggcacagtgtggttttatatattttagggagacatgagacatcaatcaatatgtttaagatatatactggttcagtctggaaaggtgagacaacttgagtcgaaggcaggacaactcaaagtggggaggggcttccaggtcataggtagataggagacaaatggttgtattctattgagtttctgattagcctctccaaatgaggcaatcagatatgtatatatctcagtgagtagagcagtgactttgaatagaatcaggtttgtcctaagcagttctcagtttggcttttccctttagtgattttgggggtcccaaggtttattttcatttcacatccccccttttcttttttaaaatcttttggagaaaacattttaggagaaaattaatctgctctcaggttttgtctgatgtttcatggctaggatggtttatttttagatgggtaggtcttgagttactaggaaagttcatttttagtaagttgtgaagtctcatgtcctatgaagataaagtagggggaggaagggagaaaaacaaaaacaaaagaacaatattggaaaattggtataggccatattactctgaagtccatactttagtaggcaggtatgaaagtggcttatgtatgtaaataggttgctattattttcttctgaagtttaagttgtctagtttcagttcgtagggttttatgaaagcacagcttagttttcagtgactctaaactgggaaagatgtgggggaagaaaaaattgaaaacattattttgaagacttgtagccaagaaaaattagaatttggtctgaactgtagaaaataataaaaatcgaacaacattaggcaagactagaatctaataacaggtgtaccatagtttttgaaatataatttttctctgtctagtttaccatttttattaaagacaaatcatggtaggactgatttgttttattatacttggcctgattatttgcatatagtatagcaagaaaaattttttaacataggcttttaaattggctttgatggaactttgttccatagaaagaaacttagataagagtttttaaaagccaagcccagtcatggatttgtaccatcaaatacctatgagttgagtgaattcttctcctcttgaggttccaagataaacttggggctcctgggcctgtcagaaagtgacattctttacttatcataagtcagcctggctgaagacctgtacagggactgtgtcaacaaggtatgaggccagttttcctaaggggcttttattggctccataagtcaagtgtgattctttaaaggaaagcacaccattccagtcaaaagtcttggtaaaataaccagtttctctagtcgtgtcctgttataaatgaaaatagattcttactgtacttttgtaaataactgtattttcaaaagttaagaatactcataaatagtttgtaaattctggagaagtcagatagagagaaacaaatatgttttaaagtttgttcataggcatatactaaattgttaaaagttgtcaatagctcaaaggaaaagtttccttgactatgaaaaaaacaaaacaaaggatcagcaataaagttttaagtcagaagtcaaaaagattatttcagtcttctattaggtcactatttataaacatttccgttttccatgaatcttaaacatttttcttctattctgatgtcacagtctccaaagttatcagaaatttgtattcaagaggatctgttagagctttatggttgtttataaagccaccttctaaagaggaccaaagcaaacaacaattgtctgtggatgacaaagttttaggtcagtcatagctgacatacaattgacaaggaaatttgttacttctgtggcacacaataatttaacataacaattataattactgataatgtatactaagtcatatcagaattataggaatttcccataattttggaacacataccaataacatatttatataaatacagcccagataaagtcaaatatcattttagatttgacttgtttcctgtataatttgtatataaaataattcaaactaggacttttgggaaacccaatatcttaaaggattaaattttgactttagggaacctaatatcttaaaggattaattaggtcagaaaaagacaaaatttataatttgattttggaaattttgtaaaatatcaaaggttaaaaacacaggtcattgtaaaacaagtcattcatttgaccaaagtgataactcaaggatttcaaaaaaaggcaaaaactttcattctttgagagaggacacttaattttccaaacaataagtcctaataaacagtatgaaggcaactacaatttttttttttttgaaacggagtcttgctctgtcgcccaggatggagtgcagtggtgtgatcttggctcactgcaagctgcgtctctggggttcacgccattctcctgcctcagcctcctaagtagctgggactacaggcgcctgccaccacacctggctaattttttgtatttttagtagagacagagttttaccacgttagccaggatggtctcgatctcctgacatcatgatccacccactttggcctcccaaagtgctgggattacaggtgtgagccactgcacccagcccttgtttttaaaaattttataagcaatctataaaattttaatctcggccaggtgtggtgactcaagcctgtaatcccagcactttgggagactgaggcgggtggatcacctgaggtcaggagtttgagaccagcctggccaacatggtgaaaccctgtctctactaaaaatacaaaaattagctgggcatggtggcatgtgcctataatctcagttacttgggaggctgaggcaggagaattgcttgaaccaggaggcagaggttgcactgagccattatcacgccactgcactccagcctgggtgatagagtgagactctgtgtcaaaaaaaatttttttttttaaatcttgaccataagatataatttccataaaccttttataacttttattaaggagtcagttaatgtttcaaaaaaaccttgttaatctgacataggggcttatgcattggtcttgtatcagtgtgtctttgatattaattattaatttatagggaaactgaacttattttatctctcaaaatcagcccttaaaaatctcacatattcacctcttctgtgatagtccctgggccttgaggagttgaataattttaatttctggccctgtgacttcaggaatgtagtttattttaattgacatcttctattgggcctgaagatgaggctttaattgttgtcagtgtttaagatttagcaggacttggtgtcctttttagtcccaggagtcaaagtcctataactcaatgtcacaagtactttaaaagtacttgtatttaaaagtatgagctgaaaatgagttgaaggagagcattactattttgtgccctttaaaaggagaaagaaaactgaaaatggcgagatgcaatgaaagttgaactttgggctaaaaaaagttaaaatctcttgtaatttattaagagtaagtcaatcccttaagaaaatttcattgttctaaccaattatttagtgtagaagtgttttttttaacatcaagcccaatttctagaaagatcattatactttctctttaattgacaacttgatcatataaaacttttttaaaaaatgaattttcttattgtgacttacacagactgttcataacatgtttggactttctggcttgtcctgaacatccctctttcttaaaccatcagttattttactttaggactaaatctaccgtacaagactctttctcatttctctttacgctttcttaccgaaaaaaaaaaaaacctctttacttttataactttcttcacatctttcttacttctgggttccttttatcttgttttatacataacctttaaatacattttaaattagacagaagtcatttacctagattatttctgaaaactgtgataatcatcatttaaagttatggaaccatcattgtaaaattataactgagacagtgatctcagttttaacctccaagttgtccttgtttattttggggtgtgggctgaactaactttgggaggaatttatagtttagctttgaaacaaagatgataacaaacccttccccaaacaaaccttactgcctgtagactagaccgtctaaagtcacaaaattaggagttatggtaatcttactaaattcaagatatagttttttattaaatgaatatcaatatcttattaaagattacacaagttggctgggtgcagtggctcacgcctgtaatcctagcactttgggaagccgaggcaggcggatcacaaggtcaggagatcgagaccatccttcataacatggtgaaaccccatctttactaaaaattcaaaaaattagccaggcgtggtggtgggcacctgtagtcccagctactcaggaggctgagg[139 bp omitted]tgggctgtgtttatagttttgtaacccctataccaaattttgacacctttatagtatttggcagggatagaatgaaattgtttaattaataaatgcaaacaacaatgtatgttggcaattattaagacatttctaatattactttaccaataatgttaaggttaatttattaaagattttacttgttacataaacttgaaagagcatttgactagtcttttcttttttcctgataaagtatttgattcaagtgttttattttcttaagccaattagagttcttttatatattttcagtagtgaaatattatatatatattatatatacaacacataaatacatagatgtattaggcatgccagtggaagtacttcctatcagttcataaaaaactttttttttcctatcttagactttcaaattcttaacaacctgttttattatcttaggcacttgtcagttaaatagtcttaaacttgtatattaaaggaaacaactcgggtaaaaatctaatggcaaaatttacatcgtaagttatggagagaaaaagtctgtgttagagggaaattaatatgaatttaattgtcatttgaacataaaattatagaaattataaagtccttttaaatacacacacaccttatagtttttacttcagaactttagccatgagataaatacaaattcaccagcttgcaaaatgaatatgttggatctaaacagtggtttttatctgaagagaaaaataacagcagatttaaagcaggcagaagagaaaaatagcgaaaaagaatttaggaacaacgtagtttgcaggtcaaacttagggctctttttctctaatgtaagtgtgtacaaggaccatattccattttacataaactctggcaagtagaggtgtcataaaacctacagagtgttcaaaaggaggtcattctccttgttttctcctcattagattatgtctcactttttttctgaagagggggaactgagctgtggcctcaggttttttgtgtggtggtttgatgtgtgctgcttgtggccagactccacaatgtgtcaccactaagttgtttcaccctcttacgtgtctcagtttctctctccagaggtctaagacttctgagagggttcaaaatgccaggtgatcagtttttatacgtgtttcctggatgagtcttttttttaaattaatttttgttggagatttccctgtggggttgttgtatgtcatgggggtcaaccccccagacactcccacaaggcccccggtcacccaggggcacctttcagctgggaggagcaaatgccctttctcttcagagctgagaaaactcagtctctcatttatctatgaaaacaacagttcagttcctcatgtaaatgtacacagacaagccgaattgagattacttttgggagacaaagtagtagacaagacctcttagaatgcatctccgaactagaattaggctccttaaacaacaacttcctaggagagaaaaaataaacaacagccaagggcatttcctgtagactgtgttcagccacccctactttgtagctctcatccaccattacacacatcaaggtcaaatcctctcacagtacaagataacctctggtacccccaaagccaaagaggtcaggtcatgtaatacagaaaaacagacctttagacctaagaaaaatctgcctatgactcttgaaactcaacaaagaaaacagaacaccccaaaaggggtgactagaacctttgttctgaattcttttaaagggttcaagtcattagaagcctcctctagattttttggtactgtagatggcaaaggggcaaggaggtatggggtggaagaaaagtaaatgaaagaacttttttttttttttaagacaggaagtaaacacagaaaccaaatgcattttttaactcttttatagttgtgaggaattttagtcaaattagagaggttttgttacccataatttggaattttcacttggatttgatcaagtcatgtaaagctggtcaaatctgatggaagaaagaccggaacaaacaacaacaacaaaaacccaacaatatgatcactgagtgttctaatggagaaaaaattaagaccagctggttgttgaactttagccaagacaaaactccaattcagttatttacctagggatgggtctgaggctgaagactgctttctaccatcctagaagcaggaaaaaagcctcaaactcctcttccctgccgagagtgagctcaaactccataaaggagttacctgccttccatcgtcctgtaaacaggaaatcttgccttccttgttgggagcaagtaaactccaaaacaaacaaacaaaacaaaagagggaggagttgtacagcaaaataaactttagttcttgactaaatttggggagatcagggattctctggagggggtgcttgcagacttcaataaattgtcctattggtttgagccataaagttagctcatgctggtaccaagcaccgacaagagatttgtcaaaggtcaggggcatctctactcagaatccctttatggttaccaaaatgtgaaccccaaaaatctgagacaggtctcagttaatttttgtgtgtgtggttgtgtgtgtgtgtgtgtgtgttttgtcagttaatttagaaagtttattttgtcaaggttgaggatatgtgtccatgacacagtctcaggaggctctgatgacatatgcccaaggtagtaggggcacagtgtgtttttgcatattttagggagacatgagacagcaatcagtatgtataagatgtacattggttccatctggaaaggggacaactcgaggtgaaggcgggacaactcaaagcgcggagggggcttccagatcataggtaggtaagagacgagtggttgtattctactgagtttctgattagcttctccaagtgaggcaatcaaatatgtatttatctcagtagaggggtgactttgaatagaatgggaggcaggtttgtcctaagcagttctcagtttggctttttcctttagtttagtattttggggtcccaaggtttattttccttttacagtataacagcctgtttcatcaaatgcctgtcgttgcccctttaggtggtttattattattttttaattcatcattcaacttgaaggtcacttatgttgttccacttgtacatgaattcatagaaaccatgagtactgggtgttgggtcagaccacaactgttcactgtgggaagcctttacttctgtctcacctctgtgccatttctcccctagatccaccctgatttcagcgggcgttcctgggtcttgtatgcactaggtgccctcaatgcttggcaactggaatgggttagcctggaggcatttaggctgtccttctacaaccacagaagagccatcactggcagagagatccttggcgcagttaagcagagatcttctcagaagagcttttgaataaatgaagttgttcagaatggccttgttaaaatgactcacttgtcaaaaaactagatgtgttggaaggctgggttggaagacaagatgtctgagaagctgtcctgctgcatgaggagtttcattgctacacacctagtctctgggtcctgtgtttttggcctccagcttacttcgtgaacataataaaggaaaggcattttctcttgtgcatgctatgtgtgcatgtgtgtatgtacttgttgtctatggctattaatttcttatgtatactactcccgttttgcgcttacccattgtattctttgaaggacacaactagatcgatgacactgtatacccatcatctctccccactccagactgagggtggagactgctacactagaatgaactgagatcacaaaggattgggggcaagttggggggcacgtatgtgggggtattaatccagggagaggggagcttgaaagtagacagtattgcccaaacttgcagtgtaatgaggactgctgccagcttctggctttctccctatccacctgtgcctgcctctccaaccttagcccccaacctttgctttggccgtaattttcccttttacctggcttgtgtagattgctatggctcttgacagtgttgagacattgtttagactcctatgaggaaagacaatttttaaaatttaagcacctctgccatgatttacaggaactaaagcaaa[140 bp omitted]gtgaaaccctgtctctactaaaaatacaaaaattagcttggtgtggtggcatgtgcttgtaatcccagctactcaggaggctgaggtaggagaattgcttgaacccgggaagcagaggttgcagtgagccgagatcgcgccactgcattccagcctagtgatggagtgagattctgtctccaaaaaaaaaaaaaaaattgtggcagtggcattgattatctatgatgtagcacttatatatattaatgtgtgtaataagtgtacaagtgtcaaatgtataatctggtcccaactgcagaaaaaagacaattataatagtatgataaaatcaagggcaggcatggtggctcacgtctgtaatccctgtactttgggaggcagaggtgggcggatcgcttgagctcagggattggagaccagcctgggcaacatggtgaaacctcatctctattaaaaatagaacaattagctgggtgtggtggcatgcaccagtaatcccagctacttgggagtctgaggcaggagaatcgcttgagcccaggaagcagaggtggcagcaagccaagattgcaccattgcactccggccttggccatgggagtgaaaccctgtctcaaaaaaaaaaaaaaaaatcacggtaaggagcaaaagggataaatgggatgatatgctgtagataggggtgggtggggagcctgggggaagcctgggtaggtgacatgaaggagaaggtcttaagaatggagaagggttccttagcccagaggctaaggaaaaagcctgagcaaaggccctgaggcaggcaggacagttcttggattaattggagaaactaaatgaagctgggacagctgggctctagcaagcaaggaagaaatacaataggagatgaagctggaggaaaagactggggccatgtgatgcagggcttgggttttacctgggtacagagggacaccactgaagaattttaactggagaattgacattttacttaggtgttttgttttcagacagagtctttctatgttgcccaggctggtcttaagctcctgggctcaagccatcctcctgccttgacctcccaagtagcctggattataggcatgtaccaacgtacctggctttattttgttttgttgttgttgttgttgtttttagttgagatacaacctacagtaaagtgtacgaaccttaagcacaccacaaagttctacatatgtataccagattaagatacagaatggccccatcactgacttaggttttagacctctgttgccgctgtcaataatggatcacaaagtgtggaaatgagaagattatttagaaatgttccatgtcagtttcgtagagaggtgatggtgatccagttgagtgtgaaaatggagagaagtgagaaatttgaaatgaattttggagagagaatacaacgtgctcatggaatgaatatgagcatgtagaaaaaagtactgattcctaggtttggagcttgggcattgtgggaaacagccatgcaatctacagagatggagaagactaaacacaggacaggtgttttggggagaggaagaaattgagaattccattctggacatgctcattgtgaaatacctatgaaacctgcaagtgaagacgtgaaatagataggactgggcccaaaatacaaatctgggagccatcagcatcaaaaggcaatgtatagatcagcaggaatggatgagattacccaggaagatggggtaaaaagcaaaagagaaaactatccaggaaaaagactgaaaaattctaatatttaaaatcagacagtggaggagccaacaaaggaaaccaaggataaatctaagaaaatcaggagagggtggtgtcatggaagccaagagggagaacatggtcagactggtgttcacaatcctggtgggaatgtgaggatatttatgtccatttggtgacatgggggtcatggtgatcttgagaagtcaactcagtggagcacagtgggtatcagcgagatttgagcaagttgaagagagaacgggaggtagttagtagagacagctttttttcttatggtgttgagatgaaaggtgaaatctagtttgaaagagaagagagacacaggctggtaactggagagtcacttggtatataaagatttttaagatgagtgatactagattttaattgttcattggtgggaattctctagcagagagggagatattaatccagaagaaagtagagaaagccaaaggaccttgagaaagtaaagggagatgagatacagagtagaggtgaaagagaagatagatacaaattttggaaggtttagatgtttggtgatgaaaacatggagttgatacctatttcttttttcttttctaaatggtacaagtaaagcagaataggggcataggaggtttaaagattagatatgaagttgtttgagggagtaagtgagagttggacacttacggacagatggatgactaggaataagtgcctgtttgagatttgtgatcatgaatcaaaagcaaagccagtcttgggtgactttccctaactatgtgctccagtgccagcatggagaacacggagtttgggttctgccaagagagctgggaaggagagaagagcaagagagcaactccgtggtggcctatgtgatccaggccagatggtaggaccagagggtgagaggagtgagaatggcatggagctcaagggaagcacagaagatgtcaggcctgtaaacagaggctccaagaaggaatttctctccccagcaatcttcaacgttagctcacagatgagggcacttgctttagaagcagtggtgacacccagtgaccactctttgaagtgcaccttcttggttttaggttgtcagcagatccggaagtgtgtgtttttttccacttgggaggcatcagagccctcaccattctctccatggttctctcttgcaggattctgtcccattggtcctggacatttcaaggggatggagaggctgctgcttaggggggtaactagaagtggactgaaggcaatctgggggctgttagctccagaccccagacctggccttctctgctaggttcctgctgtcctgagacagatcctgaatcctgggatggctttgggtattctaaagccctgcttggatttagaaaaatgccaggtagtgacataatcctcttccagcccacagttgtcctggggaaataccatcctggctgacccagaactgtgtgaggactctcttctcagcaccacctcccgaaagttgactgttgctggggttctaagagggttccactgtctccagctccacttgacccaagcactgggatctggcttagtctagagagaaacgcagattcctcccaaagtcctgtcagtcatcagaggtactgggcatgacttctgggccaagaagttgggtgtcccttagttagagggtatagggaaatacaaagaggaccaagacaggacagcccctttgcagcaacctaaggcacttttactgttctgatcaattaccctgtaccaggacatgctgtttcccttccactttaagaggttagtaaatcaggtttgagttcaaacacaagagggtcactgaggcatggggtaggtgagggaggtggtttctaaggtggtcaagaaatggaggaagactgtttctgactcacctctatccctcttccccatctcttatctcacactccccggtttgaactggactttgtacttagggcagcctggtgtcgtggaaggagcctgtgctgaacttgcagtcgggtcatcccttggccacatacctgcttccacatctgtaaaatggtgatgtggtgatggcacatggttatggtgaaaaattaaacaatgcacatgaaagtgtttcttacaccaacacaatgctttggtttaaggcattactattagatatttataccaaggcagatttcacagacattaaggaaaaagaaaaaagttttatggcaatgaaattccattagaggtgtataccaggccctgggggaactcatcagaggcaaagtgaccattgatgtcttttccaagactgagagaacacagaaagaggtgggtaaaggagaagatccaccacttggagtcagacagacttagcttcttatcctgtatttgccagttactagttgtggcatctcacacaagttcttgaacttcccagatgctcagtgtacccctgtataaagtggagataattcctccccgctgacctgttgagacaattaaatgaagtgctgcctgtaaagcaccttaaatagagtatgcactcagtgaatatggtatcatgaaaatgagttaattcaggtcatcccaaactaaatattttggacatatgttatgggccaggcaccaggctaggtggtgggtgattttgtcttataacacagcttttcagatagacagttctagttcaaatcctagatttaccacttaccagctgtagaaatgtatttaacttcttcgagccctagtttcttcctatataaagtgagggagaataatacctattttgagagattattgtaataattatataatctatgcaaagtgcctagcacagtacctggcatgaacaaagtctcaaaaatgacagtgattataattaatatgatcatgctgaaaattaaaagtaggagatgctgatgtatcagatttaaagctggacgcttaaataactttatttatagcattaaatccatccttgaaccaatcttctctgcattaactaaaatatgggatttacttccccttatacacatctacacatcactcccaaaatacttaaagcaagatatttctattggctgtaaagagggacatggtaaaatacggaaatgggcaagagaggacagctgtgttatctgtctttaaagctttttcagggaagtcttttgaagattttaagtgttttaagcctcaattgccagatgcatatgccctgtgcacatgccttttcctctagggaaaccctgttcagggtctcaatgtcccctggcccagctgccttaacttagcgcaaatgcaaacttgccctgtatctccagtggctcagaactgccctgctagctctcaaccctcctccacgctttttctttttccttgcttcctggtcctgccccctcgctccagccagacccacagcagttctgagtgtttgctgactttcactcctccaaggaggacgggctttcgctatggtctctgtccacgcccacagcttagagaaagcctgatcagtgtatacacaacccccttcctggctggtggcgctgtccttggaaagccatttactagtccataaaagggcctgagcacttaaaacaaacatggactcggtcaaaccagaaatttaaaattgcggcactttaattcaggtcaaccttcattctctttccaattctggtgccttaccctgtctgagtgtttcccatgtgcttaaccctcctgcttcccagtggctgccacaccccagcgggcctgttggtgctgggtgtgggtggagagttcccatccctgctgtagaatgacagtgatgatagctaagctttattttcactccatgcacagtgcttactgagcactaagctccaggcactgttctagatattgggggtcagcagagaccatgacaataaagtccctgcccttatggagcttatattctggaatgggagaagtcataaatatatcgcgcagtgtcaggtagtgatacatgccattcagaaatccaattcaggcaggacatggtggctcatgcctataatcccagcactttgggaggccgaggtgggcggatcacttgagcccagcagttcgagaccagcctgggcaacatagagagaacccgtctctacatacacacacaaaaattagctgggtatatgttgggggaaaggcttatggggtgcctgtataaactggctgtaaaaatatgggacagtaggttgtgaaaagccacaaaaggcctctgaggaggaaagccttcttatcgccattatgttcccatgctctgagcgagacttgctctcttatctataaacactgtgttcaagaaaaaagaccctcctttgaaacattagaatgtggccagatgtacaggctgctagttaaacccactcccactaactactctccaataagttaaagatacactgtttgagcacaaaggagattcatttaaaccaccactgctatagattacacgtatgacgcactgcctccctttcactgtttcgccttcaacatctgcttcttagttctaagtgactgtactcaataaatagtgcagagaccagagctctgagccttttacagcctccattttacagttgtccccctggcccacactctttatgcactcttaacctgtatcttctcattccttcgtcgccactggactttgggtaccgtacgggtggtgttgaggctggtctccaacaggtatggttgcatgcacctgtggtcccacttacgtgagaggctgaggcaggaggattgcctgagcccaggacgtcaaggctgcagtgagccgtgattgcaccactgcactccagcctgggtggcagagcaagaaaagaaaaattctaaacaaaacaaaacaaaacaccaaccaaacaaaaaaaaccccacatttcacaacagagccaggggcacatcaatgatgggaggtgctactttagataggttgatctgggaagacttctctgtggaggtgactcttgtgcaggtccctgagcaaaaggaaggaggagccttgggaataatgggggtaaggattccaggcagagggcattccaggcagagggcacagcaaatcactggagtagaatgagcttcacatgttggaggaacatctaggaggcctcatttttcttttaatgtcatacagtgatgagcacttaaaaaatctgtgataaaatatatacaacataaacttccccatttaaaccattttgaagtatacagttcactggaattaagtacattcatgctgttacgcagctatcaccacaatccatctctagcactttttaatcatcttctcaaactgaaactctgtgcccatcaacaatgactcccccttcctccctcccccaacctctggcaaccaccattctactttctaggtgttagcactttaaatgtgtcatctcatttcatcctcaaaacaactgtaggccatgagttttactgtgatccccattctacagatgaggaaacgtaaactgagtgaactgtctcagatcacacggccattaagtgagggaaggaggtctccattcacagtgcttctggctcaggctcctgcttgtaactgcgtacctggtaggggtttaggatgtccttctgccgcccctctgaaaacatagaggtgagttgagagagtttcatgtggattacagacaatgtgagaagcttttctggttgggacaggagggggtttgttgtacctcactggtcctgtctgcctggaaggaagaggctcttgcccagtgacgaggattggggagagaagggagagtaggtaaccaacatctgtctgctattctccttttccatctttgtcttctgagctgtctttcaaggggtatcagctgctctgagtggataagcatgggcatctttattgcttggtgtccagtcagccaggtagcactaccaccacttatttattactaggttataacacagtgctaggtgctgcaaagagattcatccaggagctacgcatgacacagatacagctatgcaacagatatcagaaggaaaaagcaaaacaaaaggaaatcaagatgagactagccaaaaaagtacagtacttgagttacatctggaccagagtaagtctgtttttgatgatggagtgtgtgcaaaattgggatggagtggctctatttgttgcagctggagccatgaccacctgtcctgttccaataaccaggttgttggaagagctatcagtttcctggtttgagtggtcttgctttggtaccaggaggtgttgagtttcacttcctgccttcccacatataagctgaaagagctcaggcaagttgccttacccttccaaggctatttcttcctttgcaaacataatcatacctactttttagggttggtgagaagatcaaaagagataaggtgtgtcggatgtctaatcagtgtttgctacatagtaagtgctcaacaaatattcattccttgctgagtagagcacgagtatgcacccagtggccaggagccaagccttcttcctccttatcatggtcagcaccatttctgacctgctggcttgtcctctctaatcactggattcagctttcaatttggggacccttgttacacactttgctgttcagacttagtgaggagaggccttagctaggggtatttgaattttggggaacaatccagcaatcatacctcttacctatttggggacaacctcctcacatgcagtatattggaaggcaggatactgcctgtgcctcacctcccacagtggaagcagacagggtgaggtcctacccaggatttgggatctagaatgtaggataatggagaggggcacttagcccctagagcctgcccagttcttaatcttggtcttcagtctcctgctgattctgtgggcaccctcttgtcctttcaacaagtcccctttcctcgtgggacaatcattttctgttgcttgcaattcagtcttgtgcaacactgaggtcttctcagatcaatcctgagagagatttcaaggggccttgggatgttagaacaatgggagacagctggctagaaaaggtactgggcacaaccttggtacaactctttcctcccagcagcaggttagtgggtggttaattggggcatgcatactgtcagctccaggcagtcgctgagctgtttattcacttgtttatatgtttgcttgttttttggtaagtgtatgtcttttctatgtgtgcttcaacctcctcaagattaaagctttcttttacatctcttgtacagagtcacagaaccccagacctggaagaggccacaagagatcatgtggttttagcttcttacctcaaggccaccaaatgtttaaccacccaacacaaatagaaatagttcgtctcagagactctccaagaaatggacacatttaatgtccccagtcacccattccaacgctggctgctttgctttgagcctattttccttacacagattgtaatgcttgtagcttcttcatgaaagcacttcagaggattataaaatcatccctcagccttcttttccctgagagccaatggtgggaaaacccagctacctacaggtccaggctcttaccaaaagggtgagctgtgagtgtgtgcacatatgttgtaggggcaatggggtagtgctgggtctggaaagcaagcctcggacaacacctgccctctcctgctgactgttgctactggtggaatgtaggctgtgtttttgagagatcttattaatttttcagggaagctggaaatctagaattataagtgagagtcctgattttttaaaatgttggcaactaatctgatttttaaaaaccatgaaccgggccaggcgtggtggctcacacctgtaatcccagcactttgggaggccaaggcaggaagatcactcggggccaggtattcgagaccagcctggccaacatggtgaaaacccatttctactaaaaatacaaaaaattagccaggcatggtggtgcatgcttataatcctagctactcgagtggccgaggcatgaactcaggaggcagaggttgcagtgagcctgaggcaggagaatagggtctggaggcagggaacccaaggctgattcaccctgaattcctagaactaaatcaaaaggaaaaccccaactttcaacacctaagcaacaaaaggaccagaggctactccctttgcaaaccaccctgcctttctgcttggcagatagaaaattgaaagtacctctgatagattgctttccaaaaccaatcagacatttgcataggagggtaactttgtaacttcacttcagcctctgattgtggaaagcaaccaattagactgattgcaggccaccacttcatttgcatggggtgaataccaagtgcccaataggaaacctctagagggtgtttggaccccagaaaattctgtaatgggggctctggagcccctatgcttgggcccgctcccaccctgtggtgtgtgctttcattttcaataaatctctgcttttgttgcttcattctttccttgcttagtgcattttgtctaattctttgttcaaaatgccaagaacctggagaccctccaccggtaacatattttggtgagccagccaaaaggtaagcccaaagtttggggtttatttttctcctttctgctccatacagggtaatctctctgtctctctccctctctctctctctctctctctctctcttttttttcctttgcaactcgggtcccttggtgagcagtgcctaagcatggaggcaactctaggtctctggctgtggcaggtgaactgaaagggttttccatgtggaggcacctaactgccaccgcctggtttgcttaagggacctgggtatttttcctttctttctttttcagtctttcagtggctgtttcctagcagctccttggtaattgagggcaactggctgggaccactctccagtgttgcctgaaggcaaaggagtgaatggggataactgccctgcccagaagcaggaaggactcttctgtcttttctggttgtggtccctgatcgctacatgtggcacagcttggggcgaactcacaagtgtttcaggcgacttaaaccttttcttatgctaaattcttcccttctcctactcgactggctaagggcaaaagaaacccactcagcctccagttcctgtcattaaagttcatggctatctctagtggaatgaagagcatgggaaattgtggccttaacaaattataagagtgctgtaagtccaggccttcatccaaggataaaaggaaagctcatagtaggccatgacctctggagggaaaacatgcaaagtggcactggtgcccatctaaggtcagagacatctgacactctaagattggaccccaaagggggacactctgggggatcctctggaccacaacctctccaaagagaacgccctcggcagaggttcttaggcctagtactaagccctcgttagaattttctcttgcagttgcgatactgtttggccccaatattgtttggaatctggagtttgctgttgaatgggaaagtaggatggagttgcatgtatccaggctttagtgctgctgtcctaagcagggttgggtctggttaatatgtgatgctctcctttggtgctgtttggccccagtgttctttggaatctggggcggtctggcctttaaaaatcaaactgctttacctgaaattttggttcacggccttcattggattacctattggggcaaacaaagtaaaactggcaagcttgtattgctatctcatggctaggattccaaggtaaaaggtattggatcttcatttatttgtgtgtagtgtgtatacatgtctagatgtgtttatttgtatgtatgcttattgttatatgttgtgtctaccaaactggcttgtaagtaaaagagccctcataaattaaataaataagtttaagcaatgttcaagttcatgtgacttaagtataactttactaaacaagctgcttttaaaattattggtaaaataaaaatagaaatgccttcagaactgtcagcatacacttttgtctggattttatatttgtctctgctagatattttgaggtgtccaggtttggcatagaaagttataaaactataaacccagccaaaacaaagtgatcttggtttgcgtgccctttttattgacaaacatgagtaatttaatgttgtcagctaaatcttgtgatttattagcaaaaatacctatgtatttaactttgagactcttacttaggtttaggtgagcacctgatgttcactggctattcaaaacgtagttaacaaggaaataactaactttaaatgatagcatctaatatctcagtttacagaagttatctagataaatgtaagtgaaagaattgagtatatgtaaatgggataaatgttttatgtaaatgttttgtgtaaattaaaatcttaaaattatttttgatgctcgttgaatatgtgggtcatttccaattaagaaagggttgtggtatggggaaatatatttttaaaaactgtgggattgttcttatctataaatgcccatgtctgatcgttcaagatttcttgctttttagtgttttgctaaagttttaggttactaaggacaaaatgtgccaaaaaagtttgtgatattagtgagaaaaataataattttgtctaattcagaagttatctaaaagttagttcaaattacagatttgaaaaagttgtttatgaaacaatgtagtaaggaaccagtaagtagggaagaaacatgtggaaaagtttagataataaaatattatttaaaacctcatagagaattggagaaatttggctaattaacattttcatagttaaagctcttagtcttgattaaagtaaaataagaaatattgtaaaaaaatgcattggcagtttggcaattcttttttaatatagttaagccgtgtttttctgtgtggagtcaaatttcatatacatacttgcattgcttcacactatgtttactgttttgcatggatagtgctggcactggagtacttactgattatgtgcctggagttaattttttttttttttttttgatggaatctagctctgtcactgaggctggagtgcagtggcatgatctcggctcactgtaacctctgcctcttgggttcaagctattctcctgccacagcctcctgagtagctgggattacgggtgcgtgccaccatgcctggttaatttttgtattttttagtagagctgtggtttcaccat[132 bp omitted]tgatattggtgagcttaaggatactgaattgtatatcaggaataaaatattcattatgtgggtttttctggcggggagctctgggtaacactgctgcctcccgggtagattgagtaggagaaatttagggttggtttcctgtttgtttgtgcttctaatttttatttgtttgctgtttacgctcctctgggctttgcttatgtacgcatatatataaaaccatgattttttttagtttctagtggaaggcttttattcggttctatgaatagttattttgtttcctatgcatttctagcaagtcatcatttgttccatttgtctggaatttctaggctacctttgttgggttcacaggaattgatggaacacaccagcttgttaactttaaactaactttttggatattagattccctgatactttaagtgtattgagtatgctttcaagtcatatttttctctctctgcctaatttgtccagactttgtaaactatttgtgaatattcctttttttttttttttttcttcttgagatggagtcttgctctgttacccaggctggagtgcattggtgcgatctcggctcactgcaacctctgcctcctgggttcaagtgattctagtgcctcagcctcccaagtgctgggattataggcacgagccgccgcgcccggcctgtgaacattcttaattcatggcaatgtttgtgtttgcatatagttgagccagggtcactagggctgctcagggagagagaacccagaaacctgatacgcagcaaaagggtaagaatttcataccagtcggacctctggcctctctttctctgtgcaaaccggttgaatgaatggtaaaagattataagaaggcatgggaatgtaaatttttgtaagcctttagcatatttaataggcttcccaaaatcaaatttcagcttacatatttagttacatgggaagcattgtcaaaataaaaaaatgtttaattttcttcaggttatatttcagtgactattaatatatgttacaaaattgtatgggatttctaaaattctaaatatgtctgagtatatgctatcattcataattatgtttattatgttaacttactgtagaccacagaaataaccaaatttcttttttttttttttttttcccaaggcagaagaatttttcttagtacagaacaaaatgaaaagtctcccatgtctacttctatccacacagacccggcaaccatccgatttctcaattttttccccacccttcccgcctttctattccacaaaaccgccattgtcatcatggcccatccccaatgagccgctgggcacacctcccagacggggtcgcggccgggcagaggggctcctcacttcccagtaggggcggccgggcagaagcgcccctcacctcccggatggggcggctggccgggcggggggctgacccccccaccaccctcccggacggggcggctggccaggcagaggggctcctcacttcccagtaggggcggccgggcagaggtgcccctcacctcctggatagggcggctggcagggcggggggctgtcccccccacctccctcccggacggggcggctggccgggcagaggggtcctcacttcccagtaggggcggccgggcagaggcgcccctcacctcccggacggggcggccggccggaaggggggctgacccccccacctccctcccggacggggcggctggccgaccccccccccccgcctccctcccggacggggcggctggccgggcagaggggctcctcacttcccagtaggggcggccgggcagaggcgcccctcacctcccagacggggcggctggccaggcggggggctgatccccccacctccctcccggacggggcggctggccgggcggggggctgaccccccccacctccctcccagacggggcggctggccgggtggggggcttacccccccacctccctcccggatggggcggctggccaggcggggggctgaaccccccacctccctcccgggcggggcggctggccaggcagaggggctcctcacttcccagtaggggcggccgggcacaggcgcccctcacctcccggacggggcggctggccaggcggggggctgatccccccacctccctcccggacggggcggctggccgggcggggggctgaccccccacctccctcccggacggggcggctggccgggcggggggctgacccccccacctccctcctggatggggcgactggccgggcagaggggctcctcacttcccagtaggggcggccgggcagaggagcccctcacctcccggacggggcggctggccgggcggggggctgacccccccacctccctcccggacggggcggctggccgacccccacccccccgcctccctcccggacggggcggctggccgggcagaggggctcctcacttcccagtaggggcggccgggcagaggagcccctcacctcccggacggggcggctggctgggcggggggctgaccccccccacctccctcccggacggggtggctgccgggcggagacgctcctcacttcccagacggggtggttgccggacggaggggctcctcacttctcagacggggcggttgccaggcagagggtttcctcacttctcagacggagcggccgggcagagacgctcctcacctcccagacagggttgcggcccagcagaggcgctcctcacatcccagatagggcggtggggcagaggtgctccccacatctcagacgatgggcggccgggcagagacgctcctcacttcctagatgggatggcggccgggcagagacgctcctcactttccagactgggcagccaggcagaggggctcctcatatcccagacgatgggtggccaggcagagacgctcctcacttcccagacggggtggcggccgggcagaggctgcaatctcggctctttgggaggccaaggcaggcggctgggaggtggttgtagcgagccgagatcacgccgctgcactccagcctgggcaccattgagcactgagtgaacgagactccatctgcaatcccggcacctcgggaggccgaggctggcggatcactcgcggttaggagctggagaccagcccggccaacagagcgaaaccccgtctccaccaaaaaaaaacgaaaaccagtcaggcgtggcggcgcgcgcctgcaatcgcaggcactcggcaggctgaggcaggagaatcaggcagggaggttgcagtgagccgagatggcagcagtaccgtccagctttggctcggcatcagagggagaccgtggagggagagggagggggagggggagggggagggggagagaccaaatttctttgtataaaagtgttaacccaagtggaacaaaaattagttgagtaccaagaaaatactttgccagatttgcatgctaaatcagcggatactaaaattgtttagatatacaatttgaatgaactccatggtctaagtcaaattacctatgataacccatcagttgtcagtgctatacagctaaactggagaaacaactggtattcaagatgacgtaagtccgatgttaagcatggactcatggagaaccaggacagcagccttgcccttcctgagtccttaaagcttttgttattcaaggttatgcactccatgactcatcatggaaaagataaaataatccaaattaaatatatattggtgtgctgacttatacattgctaaagtagtttataaccaatgtttggtttgtcaaatccatattcctgggaagacaatcaaatcttcaagtacatttggctacctcatgggccatttaaacatttcaattgccattttcaatgcatgtttctggttgtaaaaaagctttcctatgcaagagggctgatgttataacagtagattattatgctacagtgtattttcaccaggtaaagaaagctttttatgggtcactgaggacaatcaaccccttcacaatctagaacccaaagattgggtcttctgagaatatctactgtaaaggctatagttacacaacagattttaaattcttttgtgaaggttacgatagaatcggctgaacagagaagtatctgtgcagctgctggcacttgtggcttatggagaaatacatcaaatgaagattatagagatttagttgtaggggattaacgaagagatttcttagttaagtgagtagattctttagcacattctttgatttaattttaggtggtttggtttatggggatccttggtatgaagtatgctccaaactcttagtattatcctcccagtagtcataataatagtctccctggtgcgctgtattatctcaaaggctttaaatgcttgcattcagccatctctagaatgtcaaatggtctcttttcaagtggaatgacaagagctgaaagaagtgcatgaccaggaggataccataacctatgaatgatgtggtgagactggaaacccaaaatgatggcaagtgagtgtggtgctaaggccttaaattttggtcacactctcacccaagtgagaacctgaccaaaaagggagaatttttttaacaaaattatgagaggccagtgttttggactgacatcatgtgctaggccccagcaaaccaaacaaaccaaaacacatagatcctaaaacagaccaggttttgtttttctcctgcaaacaggatgttccaccataaggaggtaccctctactcagtccttgttcccactgtacaaaactcactgttgttttactgtttcccagtgggtttcaagaccaaataagttcatttatgatggtggtagtgacatgaatgactaaaggtttggtcaatctctcaaaattgagaaaatgaccaaaagggggaaattgttaaagcaaattaaatatagcctgagaaggactccgtatttctatattggagtctctgtggatgaacggtaacctaacttaggaatatgtgcctgtaaaaatagctgagtcttggccaatcccagcaaccccaaatcaggccaggagataaggtacttaataaaacgtggaagtgctctggataatagtggccatttttttattgccttcttccaaacttatggaatcacttcctttgtagtaattagcagaatgtttcaattcatctccataatgaacattcctgacagcataagtatccaccccctgaagttcctgttaaatcttttaaccatattcatttcctttcacatagagaccatcaagcttcagatgatcatgtgacaaagtttccagtcagttccaagtgaagacaccacccctggccatcaggatgccacactgtctccactagacagagtagggcaagagttccatgatctccagtaggtaggaactacgccccaagttggcataaagcagttacagttcctctgcatcccataaagatttatgggggtcatgtctctcaggagagagatgaggcaggagaatagggtctggaggcaggaaacctaagggttcacctgacttcctagaactaaatcaaaaggaaaaccccaactttccgcacctaagtaacaaacggaccagagactactccctttgcaacccccactccccactttctgcttggcagatggaaaatcttttgaaagtacctctgattgcctttccgcaaccaatcctgcgtttgcatagaagtgtaactttgtaacttcacttcagcctctgattggttgtggaaagcaaccagtcagactgattgcggccaaatattcttttgcataggagtgtaactttgtaacttcactttagcctctgattggttgtggaaagtaaccgatcagactgattgcgggccaaatcttcttttgcataggagtgcaacctttgtaacttcacttcagcctctgattggttgctttccacaaccaatcagactaattgtggcaccacttcatttacatggggtgaacgccaagtggccaatgggaaacctctaggaggtatttggaccccagaagattctacagcaggggctcttgagcccatatgcaggggcctgctcccaccttgtggaatgcacttttgttttcaataaatctctgcttttgttgcttcattctttctttacttgctttgcttgtgccttttgtctaattctttgttcaaaatgacaagaacaggccgggtgcggtggctcatgcctataatcccagcactttgggaagctgaggtgggtggatcacctgaggtcaggagttccagaccagcccggccaacgtggcgaaaccccgtctctactaaaaataacaaaaaaaattagtgggacgtggtggcgcacacctgtaatcccagctacttggggggctgaggcaggagaatcgcttgaacccaggaggcagaggttgcagtgagctgagatcgtgccattgcactccagcctgggcaacagagccagactctgtttcaaaaaataaataaataaataaataaataaataaataaaggcaagaacctggacaccctccacccgtaaacagccaagactgtgccacagcactccagcctgggcgactgactgagactctgtctcaaaaaaattaaaataaaacaacaaaagtatgaaccaaaaaaaccacctctgtgggctggatgtggccttgggggtaccagtttgcagaccctgtgtcaagcggcctaggacccaatctgtatcctttgttaactgtcaccgatactgacctcagacctggaccactgggatcctgccctgaaccccgtgctttagttggcccactccagctggagcgtatgttcccttctagatcatgctcctggtaccctggactccggaaatccctgtgtaaacagccctgagcctgcttccaaggtctgacttccatccacccagggcagcctgccctgcctggcctgagtatcgttagaatgaaggatggcagggtagggggtgtgtgtttgcctgaaccagtagacccccttcagtatgtatgggatggagtcgtgtgggaatagaagcagcaagactactagcaagggctctgcatttgtactcttgcccctggctaggcagtcgccaggggtgggcctgcttctcactgacccgtgggtcaggctgtaaataagagcgaccctcgattcactctttaccctgggccaggcagtccgatgcatcctgcatcccatcattcctaataccaactctgaggatgctgacaagcagcagccccgttttacagaccgaggcacaaaggctgaactaagttgtccatagctagtgagtggcagaggcagggtttcaatgggacagtccgtggcggagcacactggctccgccgccagcccccctgcggtacccatccgcgctcgccgcctgggaccgccagcccggggcggggcgcaggcagggaccctccgctcccctctccgtctgccgcccggacgggccaccgcgggggcgcgaggaaggggtgttgggtcgccagggcccgcctcccagctgccccggccgccggggggcctggcggtgacggcggcgcctggcggcggggatttggcgcgggccgggggccgggggccggggcgcgggggcgcgaggctggattcctagggccgcggcgcttcccggcatgctccgctgcaggcccgcgcccgcgcccggactttgccatcggcggggcagtcgcgggatgcgcccgggagccacagcctgaggtgggtgagccccgccgggccgggcgggccgcggcgagtcggggaaggggacgcgggggcgcggggcctggcccggctgccggggagaggggaggcgggtgccgcagctttgttcttgccgcggggccgcgcgcccgaagttggggaaaggagtaggagccgcgccccggagcgctccggggcccgtgcggcgcgtcccgggcgggctgggggtccctccctcccggggacagagtgggcgtcctgggtggacgagcacggggaagcgggtagggtcttgggtctgttctgtccttgtggttctggaaccggaggggaagggggaaagtaagggagagagaaagagacggagaaaaacaggaaaacttactcttcagtacgcagggaagaatagagaaagaaaaacacaaagaaacgccacgcagactgcagagaaggaccacgaacacacgctccgagaaacacactcagctcacacgcactgagaagcacacttaagataaacactcaggtcacacacacaagcacactaagaaacattcagttcacacacactcagaaacacacgcactcagaagcacacaagataaacactcagctcacacacagaagcacactcagaaacattcagttcacacacactcagaaacacacgcactcagaggcacacaagataaacactcagctcacacacagaagcacactcaaacattcagttcacacacactcagaaacacactccgagaaacagttcacactcgctcagaagcacactcagctcacacacacaagcacactcggagaaacattcagctcacacacactcagaaacatactctgagaaacacaatcagctcacacccactcaagcacactcaagataaacagctcacacaagcacattcagaaaacactcagaaacatagctaacactcagaaacacactctgagaaacacagctcacacactcagaagcacactctgagaaacagctcacacacacagaaacagaaaaacagctcacgcacactaacacaaacacacacggagaaacacacttagaagcacactcagctcacacacacccagagaaacacgatcagagaaacactcagaacgcacaggaagagagaggaaaccaagtgggtggtcttggaggcctggggaccgggggaggggaaggagagacactgagaagcgggagacgggagcagcagagggaaagatgcctggaaagagaaacagagataaaggcagacataagaggaggcagaaaacacaaaggccaaaaggaggtggttaaaaggacagtaaagagaaacacacacgtagagaaacagaggcggaccctgagaattacccccctcccccacctacctctcacaaaatcagcgacacacacagaagaggcagatgccagccttctccttcttgtggtccagtgagctcgagatgggagagcagctctgtgagccctttgagaaaggcttccttggcactttaagccaggcatgtcccaaccttgtctacctggcaaactcctgctcatccttcaaaacccagctctagcctcaccactcctgtgaaagtgtcagttcccagaaagtgtcatgcaagcacagttactctcttttctgtgttcttctgcaggaagcacaggcacatggagttgaagtggtttgtcacctgtctgcctctcccaccaactccttaagatcagggtctctgtcctatctatctccaatctccagtgcatgatgcatagtagatgatcaataaatacttagtgaatggtgaccgagagcgtttggaccctccgagacatggaggatagaattaagtgcaaatagaggaaaagcaccctcctggtattctaaggactcctaagtcagagtgtctttttttcacgtggggaaattaaagcccagagaggggagaatgcttgcacaaagagagacaagcaggaggcctacaatgaaataacagtgaatatgtacttctgtgagatgcccttgttcttctggcttatgagtttaaaataggtgtgaaagaccccgttcttcagttcctctctccagaggcagctactgttatcaagttacattttatgtgtgtttgtgcctatcgatgtgttcatactaaaaaaattctgtgcactagtatatacaaatgcacggacttctttcattcttcttttgtacacaaataaaagaattctatgagaaaaagaaatagatgtgaaacagtctcctgagtgaaaactggcaagaggcaatggacactttaatgccagttctaagtttccaacactgaaactggcaattagaactctttccagaacctttacagtcttctttcttccttagaaaggaaaagtagagtgaatgtccatctcagtgtaagtggatggctttccatctcctgactgcatattggaaaaattctgtaacctccctgaacctcagtttcctcaactgtaaaatgggattactaatatgtccacttcataagattgttgttggaaaagttaacaaagaacctggtgcagagtagatcctcagtaaatacagtttcatctttcctctctttaatgggtgttcttttgtgcatgtttttatggctgcgaaaacaactgctagttaaaatgtttccttttgtctagggtttaaaaagctattttaaggccgggctcggtgtctcacgcgtgtaatcccagcactttgggaggcccg[135 bp omitted]gaggcaggagaatcgcttgaacccaggaggcagaggttgcagtgagctgagatcgtgccattgcactccagcctgggtgacagagctagactccatcttaaaaaaacaaacaaacacaaacaaacaaacaaaaaattttagtccaactggggagcaaattcttctgagaaaggaaaaggcaaatttggggcatggcataaattttaccttggttctcttcaggccctcaggtctctgcaggtgtcgtggaggaacctagcacctgccatcctcttccccaatttgccacttccagcaggtaagacccacctgtcccactctctttcgtggcttcttgaccagatctgctctgacttcatgttctctcaagctttagcccatgaggaggatgtgaccgggactgagtcaggagccctctggaagcatggagactgtggtgattgttgccataggtgtgctggccaccatctttctggcttcgtttgcagccttggtgctggtttgcaggcagcgctactgccggccgcgagacctgctgcagcgctatgattctaagtgagtgagcctatggagggcaaggaggaggggtgggctctaactaaagaaaaagagaggaacacgtagttcagtgttgggcaactctaactcagctttttggttctaaaatggtacctgcaggtgtccttccctgtaaagacctcagagtttaagaatgttccttaagcctcccaacatcctgagtcacctccttctctgcttcctgagccaagaagaaagtcactgaatatgaacatgttcacctagcataaaagctcagccatctgtctcaaactggccacctcacttagcatttggataagccaaatcactttccagccagacccacaggaacagaaatcagatgcccacactctggccatacatctaagcaacaaacatttggttttgtgaaatcccaacttaggactgtttctctctttgcacagcagatttttttttttttttttttttttgagatagagtttcactctcgttgcccaggctggagtgcaatggtgcaatcttggctcactgcaacctccgcctcccgggttcaagtgattctcctgtctc[134 bp omitted]cagcttcccaaagtgctgggattacaggcatgagccaccatgcttggcctgcccagcagatttctttgtgatgcattgtatgtgaaatatattttgtaagcaagattctattttcaatttagggatattttaattgatagaccgttcagggattaacccttagtttttcttatccttctgtcttaatcctatcagcatctctgtcaagtggttcataatttataaatgcccatttatatgacccaggaaagctcttctactgaacagaatgccatggtatctcattttctaaagtaccctgttgtaaaattggaggtgtttttacttctttcacttttccagtgtaactaggaaaaggcagggatatagggatggaccaaagtggttcacaagagttattctgcagaccaggtggggagcctatgtaggtttgggtaataggaaccaccgcctctctgtaaaatgtaggattaaagggaaaatacattatagaaggatataattttgtcctgaagggatatccctaacatctttgtaatcaggtagttataccctactctttctcttggtagcttatctgactccatttcacttttcttttgttttagtgctcccggcctgcctccccaactccctgtctagccatgtgccctgccctcagctgcagccccactaggcttaggtttggatccgggacaagtggtctctgccctagcttactgactcccttacttcttttatggtgtatgtgggcctcagtgaggagaggatcagcagcggtcacccaccatgaaaccatttaacgggggccttttcttccaggcccattgtggacctcattggtgccatggagacccagtctgagccctctgagttagaactggacgatgtcgttatcaccaacccccacattgaggccattctggagaatgaagactggatcgaagatgcctcgtaaggccatgggaactgtttgcttccgggcttctggcaaatgatgccctttgctggtgtcctttgccagagcacttagctggcattcaagaacagtcactctgttacttgctgctctttcctgtgcctttagtgtgggggaaaatcagaatatgacttgaaagtgtttgtcctttccttctctccccacattttgtagacctgaacactgcggcctatagttgtgtggcaaaggttgttataaagtcaccctggtgtgctttggttatccttgagtgcccataaatttggctcaggcttcagagatgcagcccttttctttaggatctcaggggtctctccatccaacaggagcccctacattttgagaagcggctgctacttcattgccttatccatttagccatccattccctggtcccatgtttgtggggcattatgtggagggtactgggtcaggtgctgcagatattgaaacggttgaaaagacagttatagtcagtatcacagaaactgtaagagatccttgtgtacagtgcagtaggcacatggagaaggcagtgtctaggtttgcctgggttggggaggttgagctggatctcatggaagatatcacagaggaggtgccttttgacttgggtcttgaaagatgaggaggagttccccagtctgagcaaaggggaaggacacattgggcagagggaacagtctaccagaagcttgagagttatattaaagcatgactcgctaggcacacagtggagcttgctggaagagtggattgggtgcagggaggggaagggaagggaggtgctccctcctttaactcatgggctggttcatgttgacactgaggcattcccactctcagtggttggtattgggctgtgcccaccggtcagggcaagttgagaagcaagggtgggagctggagggtggtgggcccctccagatgagcactgatgacttcttcttgtttccccaggggtctcatgtcccactgcattgccatcttgaaggtaaccctctcttatttctctgtgggataaagggtagtcgaaaagcaccactgtgcgtggatggagtagaacgggaccttagaaagggcactgacctctcgcaagaggcctttccttaacttgacacttggaatttttgtggtttacttccccccctgcctggactggctgttcacagaatctcaaggctgtttcaaaggctttatttcatctggtcgtcttaattcaatgacctgtgggaaagacagcctaggtacacagccaccatttcactcctcttggagaaagctgtgtattcctgagaccgtgtagctgccaagagaaatggggtttccctgcttccccctgcacactcattttcactaacagagagttcaggcctgtatggtgagtttctttctgtatttggatttctactgtgactagaaagtcatcactagccttctttggctgtgaccgtagtcagccaaatgggacaatcagtgttaaaaaaccaaagcaggcatacttcaatctgaaggcagaggattttttctttgaaagcctggaatctttgaaaaattgcatccaatttgcattttgggtaattttatggttttagcatttgttttcaattcttgcctgttaatatcctacctaatagaataataactatactgaaatatttggccagttgcaaatatcagggtttttttttttacatcagtaacctgggtaatcacacatttatctctttgactagtaattattcaagatttcaaaagagacaactttgtcttttctttagtgtcattcagtagaagacactattaataaaacattctttaccccacctcttctttggctgtctctctcaggggatggataaatgcctagtaggaagttattatctcagagtccaggcttagttaattctgagaggctctttggatatacaaatatggctatagatataaatatggttattgatagagctaggtaggcataatggctagaagataatactatactacatttcccttctcctggccaagatgtgtcctgggcctgggttttgtctcctgtcctcatctattaggaggataaatggcacctgtggtgtgagatgaatcagctggagggagtcatattgaattggaatctgtgtctacccggcgaacctctgatcaaaggagagggcttctaagtctcctcttgggatcttaagactcttttgctaggtcacctgcccttgagtctctgtggtgggagctgggagaggggtctgggctaactcccaggtggacctttgggcttctttctgccctctactgtccagctccaagtataggtcaggtaggggtgcttccttgccatggatagaggcgcacccatgttggttggttctagcatggggtggcctggaaaggggaagcaagctctggggtggccagctctgtgggtgggaccacgaagaaggctgtagtcagtcttgccttttccctgcttttcctaaggtcctttcatcatcagcttgataaacatgctaatatattacctgagacaattgttgaaataagtgctgttattggagcatgtgcttaaagggaacaattgccctttgttcagccccattcctgagggtgccttgttggagatatttattcttgtggaagactaaaccatgagatgaaggaatagaaaaagaaagtaggtttttcccctaagtgagaaggtgaaattggagcacatgatttttcttaagacagattatttcagcttaggcttcccagagcccacaccctgcccttgatctgcggctcccaccccaggtcctctcccagccatgcccttggcttttgccacttcccacccgtttcctctcatctctgtacttttcacatctggccattaggttgggggccagctgcgatggaactcacggcagggctgatttgtctcgtgggggtggcgaggccctgagtggagccaggtcagccctcatctctctcctccctgccgcattagatttgtcacactctgacagagaagcttgttgccatgacaatgggctctggggccaagatgaagacttcagccagtgtcagcgacatcattgtggtggccaagcggatcagccccaggtgagcaattggcggcttcgaggtccccacactccctgagggaagagaggggctggaagctggggtagccgcagagctgggctcttctataaaatggtgcacaggcaacttcagctatttgtttcccacacatttacagagtgaccaggagggtttagataccgagacttctcagctaaggtgggcttccaccatccccacctgcagcatgacccatctgagagggctttggggaagcgccagcaggtgcctagtcctgaccctgtcctagaccctgccctgcagagcccgtggccgcccctcttacccagccacataccagctccccttgacacgccttcctcccaggccaacatgtcacacagatgcccacacccctgtctctgcctgaatctgtgttggagactagcttgggggacccactctggctgtgcccactgctccatccctggcccaggccagcagcctccagcactgggtgggagctgaagccatatggcattcaacctcccagattccaggctaactgcgaaatcccgtgtgggaggcaaccagcaggattgcagtcaacagctacaccccctcatttgggcttgatatcgtgaggaaaaataaagcccttttcttagagccaagggctgtactaagtttgtgctgccacctggtggctggtatgccgacgtgcctgagcagagggtcggggccaggatgttttccacgtcagccacctggcccctccgcccacccgggagggcacctctgtatgcctgctgaaacaatggcactgctgtgagttccaggggcccacacgttccttgttgccatggccccaggtaaatcacgaggaaccagccctttctctgcctcaagattaaccaaataaaaacgaccagtttcctgagttgccacgtgagttcctctgagggaatacacgacctggtcagcttgaactcagtccaggcagttcagtgagttgagagagtgggagggagataatccagggagggactcagctgagaacagttccctgccttctctggaattgcctccagtgggctgtagccacatggtcagcccctggctttataagaacccacatcccaggctctgggtgggcactgggcattccttccccattattttatttatttatttatttttgagatggaatcttgctctgtcacccaggctggagtgcggtggtgcgatcttggctcactacaacccccacctaccgggttcaagcgattctcctgcctcagccccctgagtagctgtgattacaggtgcctgctaccatgtctggctaatttttgtatttttagtagagatggggtttcaccatgttggccaggctgatctcaaactcctgacctcaggtgatcctcctgcctcagcctcccacagtgctgggattataggtgtgagccaccacacccggcctccttccccattagttttaaagattctgcactatggtattcactagaccctttgtcatgctttttgtgccttctaagagccacttagaggccaggcagattcctgtgatacaggttacaaggcagcactttcaggaggttgaggtttctgtgtgagcctgggtgagtaggatcagcacgggtcctaagatgagggtgtggcattgtccagagagtggacctgttctggtgctcacaggcccatcctaaagagtaccttggactacttctagaatgctccgtgccataattcagccagggtcctgctttgtccttttgccctcacacttctttctccttctggccatgttttgtccccattgtttttcctgctccatttatcccacacagtgtgttgatggcctgtgagtctcgaggaggtggcttcagctccagggcactagagaaaggagctggctgagataggcgcggagggtgactgtgtctctgcatgtcctcaccggctccacagccgtgaataagagtgtttgaggccatctttttttcaagtgcttttagaaatcaaacaatacatctttattttttcttcctatcgagtgttcatgagcaaagatttggagcaaaaccttgtgccacgcaaatcagaatgaattgtagttctgaacttgatttaaaaaaattaaccacagggtagaagaaatccagtagagcagtgtgaagccaaatgaaactcatggccttctttttcggtgtcttacatacctttagctttgtatttttttttcctgaatacaagagtaattaatgcttataaaaatgtgaaatactgcagacatacatgacctggaaagtctactccctcccaattgtaggaaaaaaccactattaagtggtgagtgttcctccagatccttcccaaccccacatttcagagcttttgtttatctatttttatgcaaatgacagattgagctttacatattatttggcaatttgcctttttaatatagtagtaatcttgaacatcattccatatgtatgactgtattttaaaaaaccattggaactgaaacaaaactagaaaacaaagtagtctctgcaaagactgaacctgaagtctttgtgcctaagtgtctgtctgagaatgcagaagcaattggagaaagaaccattaaagaccaggtctggaataccaaaaaagaagaactggaataaagatagaaaggaaggaaggggccaggcgtgtggctcacgtgcctgtaatcccagcactatggaaggctg[134 bp omitted]gaggcaggagaatcacttgagcctgggaggtggatgttgcagtgagctgagatagcaccactgcactccagcctgggtgacagagcgagactctgtctcaggaaaaaaaaaaaaaggagaaaaggagatcaggaaagtgaagtactgaacaccttttgcctccggtcagggtggatgatgttgtgaagtcgatgtaccctccgttggaccccaaactcctggacgcacggtgagaccaggggtgggtgcatgttcggtttttcatgcagaggtccacaaccgttttatcagatctgtgaggctggctgactggcttgtgtagggagggtggctttgcagcctccttaggctgcccgggccatgcgtgccatttacttcagtgagcggcgcctgactgggtgatagaggccagtcctctcctgaaacccaggagaagaaagaggcagtcttagattttaaattgttatgattagacttccggccatgttacatcctaactgtgccttcccttctaccttttcccctttccccctctgatttttgtaccccagaagcagacatgccttagctgtgagtgccacccagttgggcggtggggcagtggttcccagagcagtgagaatggaggtgacaggtcagccacagctgtgctcacctgccaccagacatgcgcatacacagagtgtacttagccctatgaaattgttatgttcctataccagatgcaacccatttaagaaatatagattctttcgtgccttggatttatatgactgtgtcatacacatgtaacagttgccagatcggcagtgggtcacagcgcttcagctttggtttctctgccccactcctactgctgccgagctttgtccgtgggttaataatctgtaatgtattctcaaatgcatcatggtactaaccatataaaaggtattctacagtgaatctttcagcactgaaaaatctactcctcactttggttttcagttacatttttttttttgagttggataaaccagccctgggccttaccaatttgtaatcaataaggaatgtttaagtgagggtgtgtctgtcctatgtttcagtgggcagcggttggggaatatgctcatctgattgactatatctgaactgtttcacaaagcgctctttggggagatgttaataggtgtgctgcagaaaatggcttccacagtcttaaataagcttgtgagagacagcctgttatattctccttggagctttaccaggtacatctcagaaggctctgaggcaggcttcagttaaccatgtttaacccagccatctccaaatttatttgagcatggagccaactttaaattgcatacctaccaacatcctagggaagggtgtgcagtttggggaatactagtcaaaaagtctatctatttgggcttttgtgcaaagtccctcatttcctaggaaacctgaccctattttctttttttccctaggacgactgccctgctcctgtctgtcagtcacctggtgctggtgacaaggaatgcctgccatctgacgggaggcctggactggattgaccagtctctgtcggctgctgaggagcatttggaagtccttcgagaagcagccctagcttctgagccagataaaggcctcccaggccctgaaggcttcctgcaggagcagtctgcaatttagtgcctacaggccagcagctagccatgaaggcccctgccgccatccctggatggctcagcttagccttctactttttcctatagagttagttgttctccacggctggagagttcagctgtgtgtgcatagtaaagcaggagatccccgtcagtttatgcctcttttgcagttgcaaactgtggctggtgagtggcagtctaatactacagttaggggagatgccattcactctctgcaagaggagtattgaaaactggtggactgtcagctttatttagctcacctagtgttttcaagaaaattgagccaccgtctaagaaatcaagaggtttcacattaaaattagaatttctggcctctctcgatcggtcagaatgtgtggcaattctgatctgcattttcagaagaggacaatcaattgaaactaagtaggggtttcttcttttggcaagacttgtactctctcacctggcctgtttcatttatttgtattatctgcctggtccctgaggcgtctgggtctctcctctcccttgcaggtttgggtttgaagctgaggaactacaaagttgatgatttcttttttatctttatgcctgcaattttacctagctaccactaggtggatagtaaatttatacttatgtttccctcaagtgtgtagttattgagtcaaattcatatgcatggtgtattgtgggacatacttagatggaaggagagagcctaagaatcctgaggatgatttctgtgtatgcctcaaaatgagatatttaggctgggcgcggtggctcacacctgtaatcctcgcactttgggaggctaaggtgggtggattgcttgagcccaggagtttgagaccagcctgggcaacatggtgaaacctcatctctacacaaactacaaaaattagctgggcatggtgacacgtgcggctgcttggtaggctgaggtgggaggatcgcttgagcccaggaggtgaaggttgcagtgagccctgattgtgccactgcattccagcctgggcgacagagtgagaccatgtctccaaaacatacatatatataaaatatatttaaagacctcttggagttcaggcagaagtgaagatagcactatgaagtagtttccacattaacaatagcaatgacttgaacgatgtgttccccctttcttctgatattaatatctgttcattttgcaaacattgaaagattatgaaagctatgacccagaatcacaattatataatttggatacatacccaaatggcataatttctgtcataagcctgtaggaaaagcttgaattcttcacttctcagattctcagagccagcttgctcttgggagaggggcctggtataggggctgcccaggttcgtagcctatgctgtcaagcatgtttggagttgcacatctgttcccatgtcattttctctgtctaactgaagtcagaaaattcctcagctggattctggggaaccaggaacccatattcccaaatccaagattgggacctggtttgtctttccatttgggcacatttcattctttccaggaaaacaggccacttccaacctgcacaatgtacaccaaaccacagaaccacagctgggatatggagtcaggagagggaagctggagctcaactctcatggactaaaggatggattctggatgggctccaggggacaccttattggattggtggcttccatcaactcttaaaaacgttaagtggtgaactttcccgtcctgtcaagctgtgaatggggaatgtatacaaagtcactttgacttttctatttgaggcctccacagtaaacatccagagtcatcctatttttgtctttttacctccctttcagaacctgttttcgtaattagactggaaagcaattcatgctaagtttgcaatggctgccacagttgtaagtgtcccctgcattttaacctgcactagagccctaagccacagagaagcagttctgaattggtatctcaaataccatccacctggtgtgggtctgcagggtggagagctttcccagcacccctgaagcaatgcccaatgtcgattaccttctctgagtcctggcaagtcctggcacattggctttctggatcccttagatgctgccctttctgttgtgaggagaggttgccgaagatattggaggtgtctgctggactgtaggatttctgatcccactgctgtgtagtttttttttctagtgctggacaagtaagaagcctctggataaatttggtgttggtggctgatggttgaagtggaagcagtctttggggtaggaggcaatgccactcctctaggcccttcgggagttggctgaagttacttcctcccttggaaggggctggttagtgagtgccagggatctcaggactgtctctgtgccaggtgtggtttcccaggcaacagacacattcctaagtgcctagttctctagcgtctgtatacatggtagtagagccttccttccatgtctctcttccctctggcctggaataggagcattagactcaaattctgatgaaaaagaaattacttggagatagagattcaatgtgaagagaacaagatatttgaagtcagaattaggtttgaatttgggctcagtgacttacagtgtgagcttggtcaagttcttaacattctggtccttagcattctcatctgtatggtcaaggctattgtcattgggttggtatgtcaacaagcaaaacggtatgtgtgagctgcccaattgtgggcctggttctgattagccaatgttaacacccttctctccacagcttcccattctctgatgccgctgacccagatggcgtcacctcagttaccatggcttggtccaagcagtgacttctgttcatgggctctggaattgagtggccaaaaatctggaatccctacagtagggagagtagccttgtccctgccccactacaagtctgttcatatgaagacatacaaagccgtcgcctctaatcagtgttcaaagggtcgattgtgcaactcacattcctccagagaaattcccccagcttgtgagatctccaagagggaacacgtattcctggcatccaacttcccctggtgctccccctgacctgcctcattccaggagttccctctccagagaccctgtgtgcccacacgagcagacttttagaaaatggcctacagttcaaaggccctgcattgctttatggccttggaaatgtggggaaagtgtcagatgaagaatttctatcctcctcacctcctccctgtctccaataaatgcataccaagagctttctgtggaagagggttcgtgctagatgctggagctatgaaacaaaaggcacaatccctgcccttaaggagcgatagagaaatgagcaactgctggagccatgactgtagccagtgctgtgatggaggggaccacaagagggactgtgggcacacagagaagggacagggcaggggtggggttgaaatagggcagagctgctgcctgaatggagacttgacaaagaaggagtcaggcatcagaacagaaaatggtcccagctactcaggtggcaggggcaggaggatcgcttgagcctgggttgggtggaggctgcagtgaatcttgatagagccactgcactctagcttgggcaacagagcaagaccctgtctcaaaacacacacatgtacacacacacagaaagtgccgggggaaataatatggttgtgctgtgtttgttctggtgggtcttactgtgtttctatgagaaaggctgatgagcaattttcagaatttgaggcaaaactggttcttcctgtttcatcctatttgtatttttattatcccaattttgcaggtaaggagaccaaagcagaaagatcagtaaccctcctggagtctcacaattaatatgaatcagagcaggatcttcaactcctcaacttgtgtttttaactggcacatcttcctgcctgggtgcagcaggtgggaaatccatcatggaaaggaaagaacagacatgagagtcattccattctcttccagttcaaatctttttttgtgaaaaaaatggtagttgtgacccatgaattaatttcacggcccactaattggttacaacccacaggatgatagaacataggtactaaaatgagggctggggcatgggtgaggtatttcctctccttccaaaatgacttaattttatccatttaaaataaaatttgcatttaccagaatagtggcaaaaatttattgtgcagaatagaataattgatttattacatgaatgattagttcaagagtcatctgttgagcatctgcactggattaggcccagagatgcatgaatgaataaaaagataatgcctctcttgaggtgcatataatctaaggtggaaagaaaaccataaagaggcattttcaatacagtgtggtaagggctaagggagggaatgtgtgtgtgatgacagcgcagagcaggaccaccaaacccaggtcatgagagtttcctaaaggtggttacatctcagaatagtctgtcgaggagtaggtgttaggagaagacagggtggggttgggaaggtggaagtggaggacagagcatccaggtagggccatcttgcagacatgacattccatgccatgctcaggacatgttagctgcttcagtactgtgagtgtcaggtgggagctgtggcatggtaggaggtaagcctggggaagaaggtgaggatgagactctggagagtctcataggccttgctgaggtctttggactttttctctaggtgatagggggcaattgaatgttgaaaattgttttcttattttttttcctggggcattagcaattgatcactgcaccctcaccagcctttaatgttttcctaatttgataggtgaacaatggcctagcattgtgttaatttgcatttccctgactactggtgcagttagacatttttttttcaggtgtttattagctatttgtacatattcatgccctttgcccatttttctactgggattttagtattcttattgacttatatgagctctttatatattaaatataacaaccctttgtcatatttattgcatatattttcacccagctttgtcatttgctttttagttttgtttacaatggtttctgatgtccagaagtttcaaattttgtgtagtcaaatttattgattttctttttgttagttattccttccattgcttttatactttcttatctagagatcaaataaatattgagagctggagctatggaacaaaaggcacataataatattcacatgttaggtgtagtggcagaaaaaaacaacagggtagaaaaaacccaaaccttcctttatccaccccaaatccaccccaatccacccaaatcctgtgggaacagtcacaggtcaaagaaatagacaagaatggtgaggagaggaagggaacaccttgaaggacgagtaggagctggtcaggcatacagggtgtgtgggagtagcacagaaaggaagctgcatgtcccaaggtagaggatgaagagacaagcatgtctgagtgcgggggatgcagggcagagaaaagccacacaatttctgctctcatgagattgtagtctggtgaggaaagacatacattaaacaaaatgttgcttaaataaatgtaaaatgaaaactttaaaagtgttgtaagaaaataatttgaatcttatgagagattataagggaaactgatctatctagatgtcaaggaaggcttccagtaagaggatctttgatatactatctggaggataagtaggagtccagaggtgaagaagtggatgtatgagaaactgtacatgtaaaggccctttggcagaaggacaagaactgagaccaggccagtgtgactgaagagcagagcagacagggaagaaggccaggtgaaaatgggggagggactgaatcatgccagacattgcaggccatgtgaaggactttggtctttctctgaagagtgatgagaacccattcaaatggtttattcagatctggtgggttttgattagaggtggagacataatcagatttgtattttgagaagatccttttgccttctacgtggagaaccaataggaggaggctggagcagataggagctgcctgatgctgctgcagcagtctaggtgagagatgatggtagcttggtctaggcagggagaggaagatggaaaggggagtggagcatttgagaaatgtttaggaagtaaaataaatagaatttgggtggattggatatgggacagtgatgcaagataatagcgtgccaagaaagactcctaggtttcaagtttgcacacttatatgggggtgacagtttggggctaggggtcactggtacaggaagcaccagaagaggatcaggtttggggacgagtttaaagtcatccgttttggagttgaagagtttgcggtgcatttgagatatctgagttgagttagagatataatggttggagctcagaaaagactgggctgaaggcttttcattaagttattaagagagttttggccatgggtgcaatcctagggagagagtgtggagtgaaaattgcagaggggtgtgagatactcttaacatcgaatatgatactgggccagttcaaagctctgtactgttatgttgatggctaaatgaaattgcatatgcccagttcctggcacacagtaggcactcagtaaatattaaatatatctcctttttctcctttgtttctctgctccctttattctatttctctctcttttctggctctatgtattacagccagagactcaagctgacttctttcaacttccccagggtacctagtgcacaaacctggcatacatcgctctcctccaagacccagcctgggagagcctacctcttgagagctgtctcaagctgaagtaagtttagttaccaatgatcagtgctcagagagccagtttttttttttccttcccttccttccttccttccttccttccttccttccttccttccttccttccttccttccttccttcctttcatttgttcttttttctagatgggatctcactctgttacccaggctagagtgcagtggcatgatctctcagctcactgcaacctccgcctcctgggctcaatcaatcctcccacctcagcctcctgtgtaactgggactacaggtgcatgccaccacacctggctaatttctgtatttttttttgtagatatggggttttaccatgttgcccaggctggtctcaaactcctgagctcaagcgatctgcccaccttggcttcccaaagtgctgggattacaggcatgagccactgcccctgtccgagagctaattttcttaggacacacagcaacttctactggatgatcgcaccttagaatgataattatgtcaccttgcatttccagaacattttgtattttttcagagagttttcacagtgattatctcagttgttcatcaaaggatttttcattatgaactgcatttgcgtattttatttacctataatcctttccccgctgctgaaacaatagcattctgagcaaacatgcatatggctaacaaatccactcttattcataagatttctttttcttgttttcccattttatttttaaatcatgatttttatcttccaggccatattctttcacacatttttgttattctcaaactcatgatttcattctttctcttctgatttggcacgtgccctcttcatctcctctcaccgacgagggttctggcccctaacgcccattgttccagtacattcagagactcacgtttctgactcctctccacctcattcctctctgaggcaagtgctgtttattctgcattgaagcttcatattacctttaactagagatttgttatgcaagacaacctcatgatcgtgcagcctcatgcagatttttcctttgccctggcatcttgaagattcttttttgcttctcaaatcacatctttttttcccattcttcatgacactttcctgatttccctttctgtattcttgatctttatcttctgctatctgaattcatcatctcagcaaacatgtgtcaagcaactactatgaaccaggctctgtgctgggctctggggattcaaaaacccatgacctgatcttgaccttgaagtattcacagcctgcaacagtgggtctcagacctggtggcacgtttgaatcgccgtctgaagaactttaaaaaaatactaattgcgaagtcctagccatagagattctggtttaattggtattgagtgagaccctggcattgttatttttaaacagattctaatgtgcacccagggataagaaccactcactagtctaatggatgaaacagatgtggagacaaatgattttaatacaatgtgaaggcagaagtaagcacagagggcaggaggagaacagaagagaaacccgggatccagcttaggaagtgagaaagccgggcaggttacccagagtggatgactcagtgccccgtctcatcccagaagaactttttgcagagcccacctttcctcccattttccaatcaaataggagaaatgaaagtatctcctagagttaccttttatcttttttttcccccagatgcagtgtttattgtttgatttgtagtgcttattgtttttggagtttaaattctccctgcatgtctgatttcagggtaccaacatgatgccattgaacatgggacgtgatgtgcataatcagctcttgggaaccttcaggtgtgggctacagcacctcactggaccgctgggttcctagtagagtggaggaagtgttcacttagccacaactttgcttcaccctggaggccaactgaggcatgttagtataccctctccctgtagttctggagtgaggacattggaaagctaaacagtggtgcttgattcaaggtgcttgatctaatttctgtggcctttgtctgaagagggaggaataagaacgtgtcaacctggaattcccagactggctgattgggtcacatttggaaagctgctgtgtgcacatctgattatcctgcacctaggactatgattcatttcttctttctcagaacgtgtatcagtttgttatattgattagcctgattgtctgaatagtgtctttctgtgtcaaatctatgaaagtttgaaccctatatgcttttgctgaatactgtatttccaatacctagtaattatacctagactgacacatagtgggaatttttttcttcaagtttaagtgaaaatttatttatttttttaaatctccaaaagcttcccattgtttattattatttttattttatttatttattttttaatttttaaatttttttattattatactttaagttctagggtacatgtgcacaacgtgcacgtttgttacatatgtgtacacgtgccatgttggtgtgctgcacccattaactcgtcatttacattaggtatatctcctaatgctatccctcccccctccccccaccccacgacaggccccggtgtgtgatgttccccttcctgtgtccaggtgttctcatggttcaattcccacctatgagtgagaacatgcggtgtttggttttttgtccttgcaatagtttgctgagaatgatggtttccagcttcatccatgtccctacaaaggacatgaactcacccttttttatggctgcatggtattccatggtgtacatgtgtcacattttctttatccagtctatcgttgatggacatttgggttggttccaagtctttgctattgtgaatagtgccgcaataaacatacgtgtgcatgtgtctttattagcagcatgatttataatcctttgggtatatacccagtaatgggatggctgggtcaaatggtattaccttttatcttaaggaatagaagagcgattatgagcataggcctgggatgcaagaaacacattcaaatcccagctctgccacttactgtgtggccttacacaaaatcgtgtgtgtgtgtgtctgtgtgtatgtgtgaattgacggagctaatgtatgtaatgtgcctcacccactgctttacattcagtagatgctcaaaaacattgtagccatgggccgggtgcagtggctcacacctgtaatcctagcactttgggaggctgaggtgggtggattgcttgtggccaggagtttgagaccagcctggccaacatgatgaaaccctgtctctattaaaaatacaaaaattagccaggcacagtgatgtgtgcctgtagtcccagctacttgggaggctgaggcaggagaattgcttgagcctgggaggcggaggtttcagtgagctgagattgccccactgcactccagactgggccacagagcaagatgctgtctcaaaaaaaaaatgtagctatgtacacttcaaagtacacaaacacacaaatgcacatgctgatgatgctcagtgtgtcttcttccagcagcaagtactcagatgactttccttgtttgccctgctggcccatccctgcttgggggagatacttcacttggtctgtctccatgtgatctttgaaggcaggtgtctgagcctcagctcccatgtgcctgctcctctccagtcccttcccttgtcttccccagttgtttagcatcttctttacctccagtgttcctgccaacattggtccctggctcattgtctggtctgaagcttatcatggatctgaatgtgatggttctcccacagctcgctctgtcatccctgctgtgttttcccttatggtggctgagtggtccactgccatcctgcatggcacccccagcctcacctgctcctgccagtgcttgtggtgggacttgagctggagctgcagctggagggctccagcttgccatagctgcccactgtcctttctaaatgtattattattgccttggctaggcctctccttttcctgggacagcaatctgaggttttcttggtcttgaggccatatagagaccttgattgccagactctgactccctggggagtgctttcttaagtttatagcttggcccattctggaatgatgctgtagtcttcctctaaagcctgcctcccactttctctgagccttcccttgctcctgaaacagaacgattacactgttctgatgtccttactttcttatttctcacctttccctgtgcattctctctcaaccctgtggcagccctctgacctccttgcatttctggcgaaggtctatgcatggcattgccttcctgcctgccactccgtttgtctctcctaattactgggattctgtttatacagacttctcactttggctctttggttttttaaaagtgatttctgcttcaattcagcactttaccatttctccttctcctctttgttatttacttctgcaaatgggattattaattttactctttgaaacttttggctttgtcctcccctgatatggcttggctctgtccccacccaaatgtcatcttgaattgtagctcccataattcccatgtgttgtgggaaggacccagtgaaagacaattgaatcatgggggcagtttcccccatactgttctcatgatggtgagtaagtctcacgagatctgatgattttataaggggtttcccttttcacttggctctctcattctctcttgtctgctgccataaaagatgtcctttgctcttccaccatgattgtgaggcctccccagccatgtggagctgtgagtccattaaacctctttttttttttttttataaattacacagtcttgggtatgtctttattagcagcatgagaacagactaatacatcccctgagagaggcttttctcttattgtctttccagatgacccagccccatttgtcttatgaagggtgaataagactccttttctcttcttttaaaaatttatttttattgatatgtatattagatatacatacttttggggtacaggtgataatttggtacattcatgtagtcaaatcacagtaattgggacatccaatacctttgttaaaaacttcagtggaaataaatttaaaggagtttaatcaaacaatgaatgattcatgaatcaggcaacccccagaatcacagcatattcagagagactccaggggtgccttgtggtcagaacaaatttataaaaagggaagtgaggtacagaaataagaagtgaggtatagaaacagctggattggttacagttggtgtttaacttagtccatgagtagtttaacttagtccatgagtagatgaagtgtggccactgggattggccaagactcagctattgttacaggtgcatactcctaagttaggttttcaatcttgcctgcctattaagctgggttacattttgtccacaatcactcatatatagaagtatggagtccttctcaggccatatttaatttgctttaacaccttaaatatttatcttcctttaagcgaggaacattcaaattattctcttctagctatttggaaatatacaattgattaatgttaactatagtcacactgctgatgtatcgaatactagatcttattttttccatctaagtctatatttgtacccatcaatcaacttctcttcatgcccctctccctgtacccttcctggcctctgggacatcctttctcttagttggtgttgttgttggactgatcactctgtcctgacctggtaggactttgctcattccccatctcctctcctcaggagaacacatgccacactcatcttactggagtctgtggattccttaaaacagcctgggagatctggaggggtagcaactattattactggtttttagttaggaaaatgagacttagcaaggaggaaacaggcctaggaagggaaactcacgctccaagctcatgcagccagtaagggaagaactgggaaagaatgcacaccaaggaattcccagttcattgcatggaggagaggaggtgagtgtgctactcagagcccctaacatctgtcatcctgtaaaagctataataaaaagtcataaatgcataaacagtgtgaaaaagttcaaaggtaaactcattaagttcagaaatataaggggtatgcctagggccaaaaaaaaaaaaagtcatctaattatgggacgcactagcacagtgtggtagaatgttaaaatagctgagaggagcctgcagagacaggggccttgggtgactgggtccctactgcatgttgggagctgttggaaacaccttacatgcattattttatttaatcttcacaagagatgaatgaccttatgaggctggtgttattacatccaccaactcaaggcgcagagaggtcaaagcacttgctcacagtcacagagtggcttaggagctgatttgggatgagagaccaggtctctcaaattccattttcatgtgcttgcctccatgtcacgatttgcccagtttgctgaaagacagacctgcacgtggcccctacagaagagatacatctctctttgggagaggttggcattggggaggaaagccctgcccgtcagccctcctcctggctgcagcgccctggctagctgtacctgtgggtgtgactctgtgtagctgtctttctcttaagtatacagagaaaaaaaatttttttccgtcgtggggataaagttcaaggaacaacctcaccaagaaggtggggctgagtgccgcccagctggctggctgcctgctgtgaataactaaccagaacacatggaatatggcatgatacgggccaagacagagcaaggacccaagttcatgtatgaccctcatcaccctccttttacatgctcccagcgccatggagagcttgcagttgggagttaagaggggctactctcccttcccttccaggtagaggttaagattcatgtctcatagtcctttattcttcggggttttcttgagacttatttgagtcaaatacgtgccaaatgaggacctgtcctgcttaagtactggagttggaggagactaaatacctcctgcttatccctccctctgcttgcaacaccctccctgttcctcagttcttcctccaggtacatctcaaatgttccctgttataagaatagctaatatgcttatacactaatacttatgtggcagatatatttattcatttatttaatcctctcaacagccctacagcataggtactattatttccattttgcagatgagaaaaacaaggcacaaaaaggctaagtaatttatccaaggtgacactgttagtaaatggcagacctgggattgtatcccagtctatttcaagatattgaagttggcagcatggtgtggtgaaagagcctggattgggttcaaatcttggtcacaccatttaaagctgcatgaacttgggaggtggcttagccatcttgaacctcaattttctcatatctgaaagggaataatatggtcgggtgtggtggctcatgcctgtaatcccagcgctttgggaggctgaggcaggaggaacttgaggccaggagttagagaccggcctgggcaacatagcaagaacccatctctaaaaaataaataaatagataaattagttgggcatggtggcgtgtacctgtagtcctagatactcagggagctgaggcagggaggatggcttgagcctggaagttctaggcttcagtgagctctgattgtgccaatgcactccaacctgggtgacagagtgagaccctgtctctaaaaaaaaaaagggaataatacatcaaacatcatataattgtttgtgaggtttaaaaaagataaataatgacattattgaacatttgaaaataagtaatacgtattggttctcttccgactttgaatcaatcaattatattaagcataaagctttagcatagaatattataggatagaatgagatgtcagatccggaaaggatcttagcaatgacctaatccaatgcattgtctgaagcgtgaggaattattgacacttgcccaaggccagtcacatagtaactcagtaactgtgacaaagattgtgagttgccttttctaatatcttgtctcccttcttagcaatagcatccctggtttttagctgggttcatggtgtcttggaaaaaggctacatttcctagctttccttggagctaagtgtggccatttgactatgtctggccaatgagatgtcagtgaaaaagtcaaaggatactttctggaagtctccttcaaaagggagaatgctggttcttttccctttcttccatctttttgcttagaaggcagatctggtaactgaagctcttgtcatcttgaacaggagtatgtcatagcctagggatgacagtgccttcacactaccatgagttatttacctctagatttatttcatatgagacagaagtaaacttctgtcatgtttaagccactgttggttgggtttcctgttacttgcagtctaatctaatcctaacagacagcattagatacggactagaaacaaggtcaataaatgtttattgagttgaggagaggtcccccagagaagcctggcctgtctttttccatctctgcaggtatttaggagagaagctggggttttcacaacaaaacatcttgaagccctaaaatgacttgtcatgccttgtgagtgggggtgggcttatctctggaaaccagggctgtggctggaggaaggtgcccaggtatgggtggtctggcactgtcggtcttctctctcagccacagagggacaaacctgtggacagagctatcctttggttccaaatgtgggtctctgcacacggtccgtcccctaagctctcagctggtgggctgaagaagcctgaggaagccaggatctgtgagatggcccgattaccttgcctgttattcactttgttactggcatgttttgaaattgatgatttcttttctttcctcaaaaaacttgttcctccctttgctttgcttttttttaaattaatttttctgtcatgaaatatttcaaagatagacaagaatagaaaagagcataatgaatacctatttacccacgattaagctttatcaaatcttaacattatgtcatatttgcatcagatctcatttaaagaaataaaatattactgatataattgaagatctccgcatattccactcctacccctgttcctctccctcctcagaggtaactattaccatgaatccagtgtttatcattcctatgtatgtttttacacttttattacatatttatgtattcattaatacaatatagcattactcagtagggttttaaattttatatataaattgtagcagattccacttatcattgaatattccattatataaatatgccacaatgtatttctccattttcctgttgatgaatatttatgctgtttcctttttttttcttttttataacccacactatgctgtgatgaattcctccacttacctcctcctggggaacagtgagagggtttgtttaaggcaagtgtcagcaaactatagcttacaggtcatacctggctaccacttgttttttgtatgcagctatgaattaagaatggtttttacatttttcctttttctgaatttgaattttaactttaaaaattgtggtaaaatggggcctggcatggtggctcatgcctgcaatcccagcactttgggagaccaaggtgggcagatcacctgaggtcaagagtttgagatcagcttggccaacatggcgaaaccccatctctactaaaaatataaaaattagctgggtgtggtggcacatgcctgttatcccagctactcgggaggctgaggcaggaaaatcacttgaacccaggaggcagaggttgcagtgagccaagatcgcaccactgcactccagcctgggcgacagaggtctcacacacacaaaaaaataaataaataaaaataaattaaaaattatggtaaaatatgcataacagaagatttaccatattcaccatttttcagtatatagttcagtggcattaagtacattcacgtcattgggtgaccatcaccaccatccatctccagaatgttttcatcatcccaaactgaaactccgtggtcattaataactcccctttcccgcttcccctagccctgacagacaccattctactttctgtctctgtgtacttgactactgtaggtcctttatgtcggtggaatcatgccatattcatccttttgtgactggcttatttcacttagcatcatgtctccaaggttcatgcatgttgaggcatgtgtcagaatttcatttttaaggctgaataattttccattgcatgtgtgtatcacattttgtttatccactacatttttaatggttaaaaataataagaaaactattttgtggcacgtgagaagtacataaaatccagatttctgtgtctattaaaaagtttgaatcgagcacagccacaggcattcatttgagtgttgtctatggctgctgtcatgctaaaacagcagttaatgaagaccatatggctggcaaagcctaaaatatttactatctggcccttcacagaataagtttgccaactcctgctgttatataattacctagaggtggaataatgaatggtaagttatgggcatcttcagctttactagatgttgtaaaattgctctccaaagcaatagaactaagtactgtagtgcttgagttttttgtaaacttctttctttcctttttggacagattctttgtttaaataaaggtgctggaagggcccttaaaaggcattgtgtagtcagttaatgttgctgcatacagacaactttgaaatttgaatggtggcagagtgtggtggctcacacctgtaatcccagcactttgggagaccaggtggaccgattgcttgagctcaggagttcgagaccagcctgggcaacacggcaagatgtgatctctacaaaaaaatgcaaaaattagctgggtgtggtggcatgcacctagaattccactacttgggaggctgaggtgggaggatcacttgagccaggaggtggaggttgcagtgagctgtgattgcaccgctgcactgcacagtctgggcgacagggcaagatggaacaaaaaagaagaagaaagaaaaaaagaaatttgaatgttttacaacaagcgtttattttgggcttattgacctgtgcattggtagggtttggctgatgtgtaacgggctcaactcagcctgactccaagcagtgggttgggctcaggtttgctccacatgcctctcatcctccttggacttgtagctgaggcaaatttttctcatgggaaaaggcaagaactcgagtgtaggcccacacaaacacttttcacgtctttgctagtgttgtgcaaccatcctgttggtcaaagaataggtaggcccaaagtcaagagctcaggaaatacactctgtccatcgtgaagccatggtatgaatgtggatgtataattccactataggggaaggaagatctggggtcaataactgaatctgccacagatatcaacgttttttagtttcaggatcttccttccttccttcgttccttccttcattcctccttcgttccttccttccttccttccttccctctctttctttctttctttctttctctttcttctccctgtttttctaatatctttttttttttttttgagatagggtcttgctctgtcacccaggctggagtgcagtggctgatcatggctcactgctgtctcggccttccaagttcaattggttctctcgcctcagcctctcaagtagctggcatcacaggtacatgccaccatacccagctatttttttttttttaagtagagacagggtctcactgtattgcccaggctggtctcaaactcctgggctcaagggatctgtccacctcggcctcccaaaaagctgggattacaggcatgagccattgtgcccagctctctctctctctctctctttctctctctctctttctctctctctctctatttctccttctttcttggagacagggtctctctctgttggccaggatgaagtgcagtggtgtgatcatagctcactgcacccttgaactcctgggctcaagcgatccttctgcctcagtgtcctgatagctgagagtataggtatgcaccaccatgcttggctaattaaaaaaaaaaaatttatagagacagggggtctcactatttttgcccaggctagttcaaaacattttcttgaaacaaaaccttatgtagaattgtaatgtaatatggagaaaagtgaagctgctctgatttgaagtgggagtgggggtgtgcagaacccctgcctgctcaactcccctctgttcccgaacacctctgcggagtcccccagcttcacagaatgtagtttgatagccagtctcttacattgtttcctcttccaggcaacgtcaacactctccccgctgcaagatccagggatctgcagcaacacaaccaggagcagatcctctctgagggttgagtctcaacatgtggcccaaaggggcgcctcctagaagccaagagtaaagaggacgcctgaggccacacctgaatgtgggcaaagtagatgacaagattagaaacagacctggtttgctccgtggctcagcccaagctggctggattgacagaacttcagctccttgcctgcctccaactcagggaaggagatccttgtcctgtggaacatctggctctcatgtcatgagtcttctgtcagagtgatggtggcttcttatcattattgactttcaccatggtcttagcagcaccttttgggcaggcagtctggttgctgtttccagaacggagccacaggccagccccatcccatgtggcctctgtaatgctttcctcttccataggcagtgtgagaagcccatccaccagagttacagtggggaggtgatgagtcagaccacatcctattgtgagcttgcaaggctgctttcattaggtgttagttccctgtggctggctggaccaggaagcaaggtccagccccctcttctcctctccatgccccagtaggctcccctgctctctccaaccctcccgcaacagccagtcttcccctcccaggcgctgctcctggagctcaatcagcaactccatctccaagctttatgtttcccattagatttctcctaattttcttgtcctttacaacctgacagtatctgtacttttgttcttatgatctaattacaattagtgatttaatgagactaccctcggaagctgcaagaaaggcagtgatgggcaggatggtggagacgggaaagtaagcagacacttggtgtctataggggatttgtcttgcatttattaattctacaaatgtttattaagcatctattatatgccagcatccaggctaggcaatgagaagatagtgacaaacaagaacatcgagccagttatctgtttctccccctccccacttgctggtgaggtcttgccgcatctggacatgttttccgtaactgacttccatttatttggctgctgagctctggctggctgcttagacattctgctgctgtgcactcatcccagccagagcagctttacagacatttactgcttgtacccttgagtttgcttcactttttgaactaagcaccttgaaccttcacagctgccttctgcaggggcccagccctggaactgaattttttttttttttgagatgttatcttgctctgtcacccaggctggaatgtagtggtgctatctcggctcactgcaacctccaccttctgggttcaagtgattctcatgcctcagcctcctgagtagctgggactacaggcacccgccaccatgcctggctaatttttgtattttcagcagagatggggtttcaccatgttggccaggctggtctcaaacttctgacttcaagtgatccacccacctcggcctcccaaattgctgggattacaggcgtgagccactgagtccagactggagctgaaattttgccccctactcaactctatcctgagctctggcctggcttgttctcacctccctgtcttagactctagagaagtgggcactgtttaaggccaaccattgacttctgataatataattagataaaggcttctggactaactccattgcctttgtatacattggtttcctctgataagaaaactgggtagtaactaaagccacattctctggagagatgaaagattaaccaagagaagactaagcttccactgtttatttagaacgtttaaggaaccagaagtgggtagctgctgcttgactctctttatcatgtgggtgcctctgtctccttctgtcttcttgtctgtaagtgtctcttgtcaagcctgattgtcccaatactcccagcaactttggaattcaggggtctgccttacagcctcatgagctctgtgtatgtttgcaggactctattttaagcactatcagagtttggagctcagtttcagccctctgtgtgggagtgccttagcgagatactggcaatccggatttcagattctgtgaaatagcttacttcagatcattcctccagggttgcatctccttggattttgaatgattggtttcagacttttagcctcaggacttggcatttcagaatgttaggtctcttcatagcttaactaatctacattcttgttgacctttaatcaataagagatggtcttggcttaaccatgggacagattctgttttacaagatttctttctttatagaggctcaggggtaggatgatgcctttcccacttcaaacagtcattttaacctcttttgatgggtatattcttgggagtgcagtatgttcttgggatgaaggaaggagatgctggaaaaacacaactttatatccccatccttcagagtataacagatctttatcttgatcaaatgtccaatgtcaacttttttacatgtaaaatgggatgcgtgtgtgtgtgtgtgtgtgtatggagggagggtagcagagactactaaacatctttctcatggaaccgtgatggggtttgacaatgttgtgtgatttttcatggaaatcttaaacaagaatacagttgtgcctaggcaggcaatacactaatacactgactgggacccatctgtagctcttagaacacaacaatagctaatattattaagcacttactaaatactttatcttacttgaaattcacagcctcctaataataatttgaattattaccatccctactgacaattaggtcactcaataacaaatggcaaaggaagggtttgagctcagctcagacttggcatcaaggctctgtaatcttccactttgtagtgactggagctgttgaaatgattattccagtgtaatctttttttttttttggacagaaatatttctattaaggatgggtcagaggcctaaaagcaggtctgtctatctccctgcccaagttctttccacttcactaggctgcctgtgaagcctgagatccatcaccgcctcttggaaagttgtgacatcatgtaattctcttggcttgaaggccactctgtcccactggctgttgaatgaagatgcttgtcagtgaattacaattttctttaacattttttccatgctaacccattatgatggttttttaaggaagacaaatgttgattaagcatgtactatgtgtaaggcaatttcacacacattattccctttttctcctcatgccaatataggaatggtgcagtaggaataattattcccattttacagttgaagaaatggaggtgacaatacacccattttagcttatggagactcaaaataccatatacaaaatcagcaggtgggtgagtagggggcacagctagaggatgatggcattaggaggggccacatggatcatcaatgtgagaaaacattttaaatgatccattttcaaggcatgataaatctaagtactggcagccaggctgcaaacgtaacaaaccacatgtctcatgcacctagaaggtcaccataagtgaatagaatgtagaagaggggtcagcccataaaagggaagaaagttttgttattgggaaattgaaacttaagcaggggaggagaccagggcataaccttagaagggagataatgaaacttaggcgatgtctaggaagattgtaaccccatagtactcaaccaatgaggaactggggggaggatttgtgtgctaggagataaattacctgttgtaactgccctgggtgtgcctgcctaccagacacctgatcttgcaagtccaccattaaaagtctcgcttccgctgttcttcgtgtctctgagtccattcttcgggtttggatgggtgaatgtatgtttctcacaaacctggaggcccatctgggatctctgtgcctgcgtggagtaagactctgggtgagaggggagatgtgtcccacctgatttaggtggcctgctctgtccgggcgccccggctccctgcagaagccatagacaaactcgagactgttactcaggaggcagtggaggtgacagagggagaaaagcaggcactgtggcaaccaggcaaacttgtgcatgagccaaggtagaaaattggactataagtactgccttggtggttgggcattttcggaggtcaagtgtgtgtgactgagaggtatcttagatacgaagcgagtgcagagtcccaatccgcagttccattctcctgcaagggaaatggccggagatggatgaagtgattttcggggtgtgcaagaaacctccaatagaggggggttatgtacacaaggaaactcagacacagagactgaccaaaaatgggaaacagaaattctaggccaaggggacaaaggaaagagggaatcaaagactctctctgacattccctggatagtcttttggggagagtgctgcaggtttggagggacaactctcgaaccagggacaaggaaaagcaaaagatgaaaaagtattgctgttttatctgtcccaaggaccccatttgtaagccttcagtcttttggcctaactttggatcagacgaggactgggtttgccaagttttaattctctatgtgaatgataaaaccccatactgacgagaagagataggttacactctctgatggatcatggaattagcccccatgttccccctcaaagaagagaaagagcctagtaaaaagtcctcacccagggaaaagccctgggaccccctaccatgcttgccccttccatacgtctcaaaaaataggggacaggaagatcaaggggcaggaggaaggttagaggaagaaagacctggagaccatgggggagctgaaccaacctctcctttaaatctttatccaaatttaagtaaagaattagaacagtgtaagaggctatgtgtgtctctgcatgtgagatgggtctcctgaatacagcacactgatgggtcttgactctttatccaatttgccagtctgtgtctcttaattggagcatttagcccaattacatttaaggttaatattgttatgtgtgaatttgatcctgtcgttatgatgttagctggttatttcgctcattagttgatgcagtttcttcctagcatccatggtctttacaatttggcatgtttttgcagtggctggtactggttgttcctttccatgtttagtgcttccttcaggagctcttgtaaggtaggcctggtggtgacaaaatctctcataggctcaaaataaagggttggaggaagatctaccaagcaaatggaaaacaaacaaaaaaaaaagaagcaggggttgcaatcctagtctctgataaaacaggctttaaaccaacaaagatcaaaagagacaaagaaggccattacataatggtaaagggatcaattcaacaagaagagctaactatcctaaatatatatgcacccaatacaggagcacccagattcataaagcaagtccttagagacttacaaagagacttagactcccacacaataataatgggagactttaacaccccactgtcaacattagacagatcaatgagacagaacgttaacaaggatatccaggaattgaactcagctctgcaccaagtggacttaatagacatctacagaactctccaccccaaatcagcagaatatacattcttctcagcaccatctcgcacttattccaaaattgaccacatagttggaagtaaagcactcctcagcaaatgtaaaagaacagaaattataacaaactgtctctcagaacacagtgcaatcaaactagaactcaggattaagaaactcactcaaaaccactcaactacatggaaactgaacaacctgctcctgaatgactactgggtacataacgaaatgacggcagaaataaagatgttctttgaaaccaatgacaacaaagacacaacataccagaatctctgggacacatttaaagcagtgtgtagagggaaatttattgcactaaatgcccacaagagaaagcaggaaagatctaaaattgataccctaacatcacaattaaaagaactagagaagcaagagcaaacacattcaaaagctagcagaaggcaagaaataactaagatcagagcagaactgaaggagatagagacacaaaaaacctttcaaaaaatcaatgaatccaggagctggttttttgaaaagatcaacaaaattgatagactgctagcaagactaataaagaagaaaagagagaagaatcaaatagacacagtaaaaaaatgataaaggggatatcaccactgatcccgcagaaatacaaactaccatcagagaatactataaacacctctatgcaaataaacttgaaaatctagaagaaatggataaattcctcgacacatataccctcccaagactaaaccaggaagaagttgaatccctgaatagaccaataacaggctctgaaattgaggcaataatgaatagcctaccaatgaaaaaaagtccaagaccagatggattcacagccaaattctaccagaggtacaaagaggagctggtaccattccttctgaaactattccaatcaatagaaaaacagggaatcctccctaactcattttatgaggccggcatcatcctgatagcaaagcctggcagagacacaacaaaaaaagagaattttagaccaatatccctgatgaacatcgatgcaaaaatcctcaataaaatactggcaaactgaatccagcagcacatcaaaaagcttatccaccatgatcaagtgggcttcatccctgggatgcaaggctggttcaacatatgcaaatcaataaatgtaatccatcatataaacagaaccaaagacaaaaaccatatgattatctcaatagatgcagaaaaggcctttgacaaaattcaacagcgcttcatgctaaaaactctcaataaactcggtattgatgggacgtatctcaaaataataagaactatttatgacaaacccacagctaatatcatactgaatgggcaaaaactggaagcattccctttgaaaactggcacaagacagggatgccctctctcaccactccgattcaacatagtgttggaagttctggtcagggcaatcaggcaggagaaagaaataaagggtattcaattaggaaaagaggaagtcaaattgtccctgtttgcagatgacatgattgtatatttagaaaaccccatcgtctcagcccaaaatctcctcaagctgataagcaatttcagcaaagtctcaggatacaaaatcaatgtgcaaaaatcacaagcattcctatacaccaataagagacaaacagagagccaaatcatgagtgaactcccattcacaattgcttcaaagagaataaaatacctaggaatccaacttacaagggatgagaaggatctcttcaaggagagctacaaaccactgctcaatgaaataaaagaggacaaaaacaaatggaagaacattccatgctcatggataggaagaatcaatatcatgaaaatggccatactgcccaaggtaatttatagattcaatgccatccccatcaagcttccaaggactttcttcagagaattggaaaaaaactgctttaaagttcatatggaaccaaaaaagagcctgcattgccaagacaatcctaagccaaaagaacaaagctggaggcatcatgctacctgacttcaaactataccacaaggctacagtaaccaaaacagcatggtactggtaccaaaacagagatatagaccaacggaacagagcagagccctcagaaataataccacacatctacaaccatctgatctttgacaaacctgacaaaaacaagaaatggggaaaggattccctatttaataaatggtgctgggaaaactggctagccatacgtagaaagctgaaactggatcccttccttacaccttatacaaaaattaattcaaaatggattaaagacttaagtgttagacctgaaaccataaaaaccctagaagaaaacttaggcaataccattcaggacatagggatgggcaaggacttcataactaaaacaccaaaagcaatggcaacaaaagccaaaatagacaaatgggatctaattaaactaaagagcttctgcacaacaaaagaaactaccatcagagtgaacaggcaacctacagaatgggaaaaaatgtttacaatctacccatctgacaaagggctaatatccagaatctacaaagaacttaaacaaatttacaagaaaaaatcaaacaaccccaacaaaaagtgggtgaaggatatgaacagacacttctcaaaataagacatttttgcagccaacagacacatgaaaaaatgctcgtcatcactggtcatcagagaaatgcaaatcaaaaccacaatgagataccatttcacaccagttagaatggtgatcattaaaaagtcaggaaacaacaggtgctggagaggatgtggagaaataggaacacttttacactgttgttgggactgtaaactagttcaaccattgtggaagactgtggcgattcctcaaggatcttgaactagaaataccagttgacccagccatcccattactgggcatagactcaaaggattataaatcatgctgctataaagacacatgcatacgtatggttattgcagcactattcacaatagcaaagacttggaaccaacccaaatgtccatcaatgatagactggattaagcaaatgtggtacatatacaccatggaatactatgcagccataaaaaaggatgagttcatgtcctttgtaaggatatggatgaagctggaaaccatcattctcagcaaactatcgcaaggacagaaaaccaaacaccgcaggttctcactcataggtgggaattgaacaatgagaacacttggacacaggaaggggaacatcacactccagggcctgttgtggggtgttgggggtgggggcgaagggatagcattaggagatatacctaatgtaaatgacgagttaatgggtgcagcacaccaacatggcacatgtatacatatgtaacaaacctgcacgttgtacacacgcaccctacaacttaaagtatatatgtaaaaaaaagaacagtgtaagaggatattgaaaactcccctatccactccacacagcaggcatctagcatgtatcctcttagggaagttcccatgggacagggagagactggctttgtaaatgctcctgttacaggtactgaagttaggaatttcaagaaggaaatgaaaccactcctagaagatcccctcagtttagcagaccagctgtaccaaatcctaggacccagcttttacacctgggctaaaattattctattataaatatactgttcacaggagaagaaaggggaatgattaggagagcagtcatgaccatctgggacaggcaacactctcctgggcaagggttcttgccagccaaacaaaaattcccaaatgtcattcccaaattggataataaagatcccagggactgggcccaaatggaggaatgaataattagaagagatcaaagagtccactcctagggcataaaatgtcgtaaaggcatttgagattcaacaagaaaaagaggaaactccctctgcattcctgcagaggctcagagatcagatgagaaaatattttggattaaatctggaagaaccagtgggcaaggccttttaaaggttagctttgtgactaaaagctggcctagcaggccagggagtgcagctgcaggcgtgggggtggcaggagccgcagagccagagcagacagccgagaaaaaggtggacagtgtgaaagaaccagtgtgagtaaacccccaataagaaactaatgtctgtattatgcaaaaggagtcactggggatccaagtctctgtataatgcaatacttaggaattatgggtgtatagggatttataccctcattaaacaagtatgtggaagttgtgtagcttgtcaaaggataaacaaaaagataatgagaaaacaggccacgggaggaagacctcccagattaagacaatttcaaagcattgaagtagataccacagaaatgccctaagtaggaagactaaagtatttactggtgatcatagatcaccttcctggctgggtctttcccctttcaacagccaccaccaggaatgtggtcaaaataatattagaacaattgtaccctagatttggcctggtggaaaatactgattcagacaatgggagccactttttctcaaggttgttaaggggaattatggaaggtttacaaattagatgggattatcacaccctttggcatcccccttcctctggaaaggtagaaagaatgaatcaaacacccaaaaagtgtatcatcaaactaatcttagaaactaaaatgccttggacaaaatgtcttccaataacactccttaggattaagacagccccaagaaaagacttgggattgtctccctatgagttattatatgggctcccatatttgggcagagctacagatctccctactatggaaaccaaggatcaatttttttttgatcaattcttaagatattatatactggccatatcctctaccctgttatcccttaggttaaaaggacttctgactcaaattctgcctcttgagtttgtggtttaccacttccagcctggtgacttggtgctgattaagacttggaaagaagacatgctgcacccaagctgggaaggtccttatcaagtgctcctgagcactgagacagctgtgcaaacagctgaatgggggtgaactcagtatacttgagtcaagtaactggtaaaagataccccagaagggaggggaaaaaacccggtgaaaagtgcatgggtcacctgaggaacccttaaagttaactctgagaaaaatctaaaaagaaaacatgagctggtcccatttctggaagttaatatggctgggataggctactatacaagaagcagaaggtcaaaatggaaactggcaggggactcctccctatccaatcaggttggtagttaatataacccagatggtagcaccccaaactataagatttaatgcctgccaggtcttaccttgtgggaatttggaaaattagagacagctctcccaggtgaataaatatctttgccctgagtcaaatgcaggttacagtagggcatcaccctgccccagctgggatgatgtatggtggactacccaatttgagggttgggcagtaaacatggggtgggaaactctgagctgaagacctttgaggaataaactacctctgtccaagagctccccaccaaataactgccagaatttagaatgcaatcctatactcatcaccattgacaatccagctgttctagaccaagaaccagaagtagcatcctatgtacataagttaggggcagacatcacagggaaagacccctagggtggtttgttctcaaactaatcaataactcaacctcccatttgcctgggactactgcaaccccagaccctaacaaacactttagtccaccaaataatgaccctaaaagggtaaaaataattgaggtaaagtatttaaggcaaatcatagaaattgagacagtttacagggatgtgaatgtctgggtctaatgggtcaaattttcggtataagccctcaagaagagtaattgctatgtgtgtgctgcaggacaacctcaggcaaaagtggctccgtttcccctaggatgggataccagtcctgaaggaatgcgttgtatgttggctctatacgaggataaggatgcatgggaaatgagacttctaggagtctgtcgttactctttcctgcattgcagaggtcagatcccacagcaatcccctcattctctatagggaatatgaactactcctcttgcctctctaggcagggggcaggttcaataagcccatgggagaactctcgacttgtacccaattcctaaacatcactggtgaggcaaaggcaattactcagctctccatataccccaggctgatgtctgatggtattgtgggaaaggaatctccatagcttgttactgtccaattggaccaggactttgctttagtccgattggccattcccttcaccctggcattccacaagatacctgaaaatacatatggccaccaaaactggagagatttgacaaattcttttgaccgcaatatatatgttgactcaataggagtccctagtggggtgcctaatgaatttaaggcccaaagtcagcactcttttgggggtcaactaattttttcttttttttagacagtgtctcgctctgtcacccaggctggagtgcattggcacgttctcggctcaccacaacctcctccacctcccaggtttaagccattctcctgcctcagcctcccaagtagctgggattacaggtgcatgccaccatgcccagccaatttttgtatttttagtagagatggggtttccctatgttggc[132 bp omitted]ttataatcaacagaaatttatcaattatacttgagacaccctcaaaggggtggctagccagttagatgccaccagccaaatggcctgggaaaacacgcttgcgtcagacatgatactagtggaaaaagggggcgtatatgttatgctaggtgggaaatgttgtactttcattctcaacaatactgccccagatgggaccatcacagaagctttacaaggactgaaaactctagccaacgaactggcagaaaatgctggaattgatgacccacttgtgggttggctagaagttggtttggaaagacatggtagcttcaatccttatatctgtcacaattgtggcaggagtcttaacctcagtgagatgttgtattgtcccttgtgtgaggggactagcacagagattaattgaagcagctattagtaaacaaatgcccatgacttaccaggaaaataacctgttactgttagaaaccaaattaaactcattctcctatgatgaagaaagtaaacgagaaattcgaggactaaaaggcttcatatgaaaatgagaccaaaggaagtaaatagaaaagaggagggagtttgtgagaaaacattttaaatggtccattttcaaggcatgataaatctaagtattggcagccagcctgcaaacgtaacaaactgcatgggtcattcacctagaaggtcacaataagtgaacagaatgtagaggaaggggtcaccctataaaagggaagaaagtttcattattgggagattgaaacttaagtggggaaggggacccagggtataaccttataagagggataatgaaacttaggcgatatccgggaagattgtaaccccacagtactcgatcaatgaggaactgggggagggacttgcatgttaggagataaattacctgttgtaactgtcctgggcgtgcctgcctaccagacacctgatcttgcaagactgccattaaaagtcttgcttccgctcttcttcgtgtctccaagtccattctttgggtttggatgggtgaatgtgtgtttctcacaatcaaatcaaattgtcttgttttgcaggtcagggaactgactatggcctagagaaatgagagagcctgtctaagatcacatggaagctaggaacagagaaggatccagacctagactgctctatgccgtatattaggatgttttgaccttgccacgactgacatttgggctgaataatgatttgttgtgggcagcagtcctgtgctttgttggatgctgcatccttgacttttcctcaccaaatgccagtagcaatccccctcccttagttgtgataaccaaaaatgtcttcgggcattgccatgcatcctctggaaggcgaaaccatctccagtggaaaaccattgctatataagatattcctctgaggtggggcatggtggctcatgcctgtaatcctagcactttgggaggcgaaggcgggcagattgcctgagctcaggagtttgagaccaacctgggcaacatggtgaaactccgtctctactaaaacaccaaaaaaaaaaaaaaaaaaaaaaaaaaaattagccaggcgtgatcccagctacttgggaggctaagatgggaggatccctggaatgcaggaggcagaggttgcagtgagccgagatcactccagcccaggcaatggagtgagactctgtctaaaaagaaagaaagaaagaaaaaaaaaagatactcctttgggcccatcaaacagcataaaactggagctcagctctttccttgtagtttgggagagaaattgcttttgggtgctaagtggagaatgtctttcctccccactcaacccttgagcactgcgggagagctctgctggggcctgggatttcagctaggagagaggagctccaagagagtagtagggaatgtgtcagagggaagacagcatgaacaccagatcttttgaaagatgcatatcattttccccattttgcagagaaaggcgtagaagttcagaaggttgaacacacccacagagcagcatatgatttcccttccacacaccataagaagccccatagaatacccaggctcactgtctctcaactccaggcccatgagcaataatgtcagaggctttctcttgtgccctctctgtcaatggcaagagcagtgtgattacacagctatgttctggaaaggtcgatctggtccctgctctggcccttcctgtgagcgtgggaggtcttcactttccccttgggggtcttggtcctcacattggactgcaccagggatgagcatcttcctggtgttcactccaccttcccacactcgcaactttgagaatcaaatggggtgaataaaggtgtttacagggtgtatttattttaatgaaaaatgacagtttttttgagtccaacgtaggacaatgtgtatttttagaatccagattaacctgttttattcacaggaagtatgttagtgcaaatgactgtttagccactaaaatgttaataactggatcgtttgttttgtttttgagacagggtctcgctctgttgcccaggctagagtgtactggcgtgatcatagctcactgcagcctcagactcctggacttgagaaatcctcctgccttagcctcctgcatatctgggactccaggtatgtgccatcgcacctggttaattaaatttttttttttttttgtaaagagtgtctctttatgttgcccaggttggtgttgaaatcctggcctcaagcaatccttccaccttagcctcttaaagtgctgggattacaggcatgagctactgtgcccggccttttctcatatgtaaggaaactgatggtcagggagcttaggccacaggatatatggttagcaagtggcaaagtcagaacgctaaacatgcgtctttggtttccaattccagctctgtctcttagatcacactgcttctcaagatgcagcggcagctactgcaagagtgagaggcagtctgggtccagggttggatgtgtacagggccctcaggttgtacaatctctctggttgctaggagtctccgataattagagcccccaggttgctaggcaacccaagttgctaagagtttcagtttattacaggtattgggttgttaaaagccccaggttattcagattttcaatttattaacagcttcatgtttctcaaaggccccaagttattagagacatcagtttctaggggccctaggctcttatggatctaggctatcgaagttgttaggttgttagctcaacctggttgctaggactttcaggttttagaggctctgggtttctagaggcctttagcttgtgaaggtgtcaatccacaaaaagcctcattttttagcacctgtagcttttcacaggttccaggttgctacggacacagtctcagagttttaggttttcccagagttgtgggtcagcccagcagttttcttccacccattcagcctctatgtggtcagataccataaatgcagctgtatgtttctctcaggtgtttcatcattgctgaccttgttcagcacccacagcagcactgacctaattcactctactcaaggccctaagcacttaggcactggtggaaaggtcttcagagcagaaacttgttatattctaaaacaaccatgtttttttttctttttctttttctttttctttttgtttttaaacatcaactcaaaccagattaaaacagccacatgttcagccaaaaaacacatgaaaaagtgctcatcatcactggccatcagagaaatgcaaatcaaaaccacaatgagataccatctcacaccagttagaatagcaatcattaaaaagtcaggaaacaacaggtgctggagaggatgtggagaaataggaacacttttacacagttggtgggactgtaaactagttcaaccattgtggaagtcagtgtggcgattcctcagggatctagaactggaaataccgtttgacccagccatcccattactgggtatatacccaaaggactataaatcatgctgctataaagacacatgcacacgtatgtttattgcggcattattcacaatagcaaagacttggaaccaacccaaatgtccaacaatgatagattggattaagaaaatatggcacatatacaccatggaatactatgcagccataaaaaatgatgagttcatgtcctttgtagggacatggatgaaattggaaatcatcattctcagtaaactatcacaagaacaaaaaaccaaacaccgcatattctcactcataggtgggaattgaacaatgagatcacatggacacagaaaggggaatatcacactctggggactgtggtggggtggggggaggggggagggatagcatcgggagatatacctaatgctagatgacgagttagtgggtgcagcgcaccagcatggcacatgtatacatatgtaactaacctgcacaatgtgcacatgtaccctaaaacttaaagtgtaataaaaaaattaagtaattaaaaaataaataaataaaacagccgcatgttgaagcacacttgggttatgtttctgttgtaatcattcaccttctaaccaattttaaataatattaaattagactttgacagccccttacttccaattattttattagattagccggaacagtaaaactagagtttgtgtgtgtttttcatttctaagaaagtttttcttttccttttttttttttttttttagacggagtcttgctctgtctgtcgcccaggctagagtgcaatggcgccatcttggctcactgcaacctctgcctcctggttcaagtgattctcctgtctcagcctcccgagtagctgggattacaggcatgcgccatcatgcttggctaatttttgtatttttagtggacatagggtttcgctatgttggccaggctggccttgaactcctgacctcaagtgatccgcctgctttggcctcccaaagtgctgggattacaggtgtgagccacagtgcccggccaactttttttttcaaagtaactataggttcacaagaagttgtgaaaatagcactgggagatcctgcatatgcttcatccaatttccttcaatggttacgtcttacacagctatagtgtaataccactgtcaggacattgacattgctacaatgtgtatatagttctatgccattttataacatgtgtagatgtgtgtgtgtgtgtgtgtgtgtgtgtgtgtatgtgtttgagacggagtctttctccatcgcccatgctggagtgcagcggtgggatctctgcctcccaggttcaagtgattactcccacctcagcctcccattagcatggctaatttttatatttttagtagagatggggtttcaccatgttggccaggctggtctcgaactcctgacctcaagtgatctgcccgtctcagcctcccaaagtgctgggattaataggcgtgagccactctgcctggtctcatgtgtagatttgtatacccaccactccaatccagatacaaaactatgccatcaccatgaagctcccccttgtactacccctttacagttacattcatcttcttccgtccccaacctgtgcatttttaaatgtatttgcttaacgtctcttcagtgccttctgtgtgcctcacccattaataggtcaaagaaatacggagataactataatgtacttgtagctctggaagagctcacagacagggccatagtcacatacatcacaaactatagtgtaatgtggtaattctatgataggaataagctcaaggtgcagcggcaagcaaataggtgagggggtggggtgttcaggaggcagagagtgttggattagctccttctgcaaaagttgtgacactgggttgattttgaaggataagacaaagttatctgttgccaaatgaggaagaacgtttagacagacatgtctggggaagagttggttgtttggaacttccagggcccaggggttgggaggtgaggctgcagggtgaagagggcagaccatggaggtccatctgggcttctgactgagtgggctggcccaattctgtaagtgacagagccccactgaaaggtttagaaatggggaatggtgcattcagccctgtcatttagaaagagccctgtgatgtagagaggccagttaagaaatgactgcagtcccaggtaagatacgaagaaggcatcaaccagagtagtgggaacagatatggaagaaccagctctgaactcagaaggagatcggggtgggaatgaggagttatcaaaaggatgaacaagcactttttccaagattgattttttttaaggtgatatcagtttcctggagagaaaatcctaggatataagtccaagaagatgaatgcgagaagagtaattccctgcttatccagagatcttgccactgcaatgtaagccaagatagcataaacttgtatgaggaaaaggcctctgatcagttgaaacaagctcatgctgttttaacttcgcaatatcctttaggtccttactcagaggcttttttgacaattcaagtgtagttctcaaaagcatagtttctttgtttcctcacctctaaaataataatataagcaatcttttattgagtgtctgcttggtgccaggtactgtgtgaaatgttttgcatgttatctcatgaatcccctccacaccttcctggggtggcagttctcttcattttacagggaggatactgagggtcagcaaaattaattaatgcaccaagctcacagagctggtaggttctgtaaaatcaggcctccccccaggtccgctgctctcagcccactgacccagactgtagaagccacaaatcacaagagggaaaggaagaatgtcagcctatagtggcaccaggtccaggaaggaaattcacatgaattgaggatcttggcaactgttaagtaatttctatcagtttcacataagtggtatataagttagccttctccagaaacagaataggatgtctgtctatctgtctgtctatctatctatcatctatctatctatctatctatctatctatctatctatctatctatctatctatatcatctatctatctatctatcttctaacaaataattttctaccaacttcacgtgagtggtatataagtcagagttctccagagaaatagaaccaataggatatctatctatctatgtatctatgcatctatctatctatctatccattttcatactgctatgaagaaaaagacgtttatggactcatggttccacatggctggggaagcctcacaatcatagtggaaggtgaaggaggagcaaagtattgtcttacatggcagcaggccagagagcatgtgcaggggaactgccctttataaaaccatcagatctcatgagacttattcaccatcatgaaaacagcataggaaaaacctgcccctgtgattcaattacctcccacttggtctttcccatgacacatggggattatgggagatacaatttgagatgagatttgggtggggatacagccaaaccatatcattcagcccctggccccacccaaatctcatgtcctcacatttcaaagccaatcatgccttcccaacagtcccctaaagtcttaactcattcagcattaactcaaaagttcacagtccaaagtctaatctgagacaaggcaagtccctttcgcctatgagcctgcaaaatcaaaaacaagctagttacttcctagatacaatggaggtacaggctgggtaaagacacccattccaaatggaagaaattggccaaaatataggggctacaggccccatgcaagtccaaaatccagttgggaagtcaaaccttaaagctccaaaatggtttcctttgactccatgtctcatatccaggacaggctgatgcaagaggtgggttcccatggtcttgggcagctctgccccagtggctttggagggcagccccacactcctggctgctttcacaggctggcattgagtgtctgtggcttttccaggtgcatgttgcaagctgttggtggatttaccattctggggtctggaggacagtgaccctcttctcacagttccaccaggtagagccccagtggggactccgtgtgggggctctaaccccacatttcccttctgcactgccctagcagaggttctccatgaggatacagcccctgaagcaaacctctgcctggacatccaagcatttccatacatcctctgaaatctaggtggaggttcccaaacctcaattcttgccttctgtgcaaccgcaggaccaacaccatgtggaagctgccaaggtttgaggcttgtacccactgaaactatggcctgagctgtactttggccccttttagctacagcaggagttgttgtgatgcagggcaccaggtcccgaggccgcacacagcagggaggccctggccctggcccagaaaaccattttttcctcctaggcctcctggcctgtgatgggaggggctgctgtgtaggtctctgacatgccctggagacattttccccattgtcttgttgattaatatttggctcctcattacttatgcaaatttctgtagctagcttgaatttctccccagaaaatggggttttcttttctattgcatcataaggctgcaaattttccaaacttttttgctctgcttccttttgaatgctttgctgcttagaatgttttctgccagataccgtaaatcatctctctcaagttcaaaattccacagacctcttgggcgggggcaaaatgctgccagtctctttgctaaaacatagcaaaagtcacctttattccagttcccaacaagttcttcatctctatctgacaccacctcagcatagacttcatttattgctcatatcactgtcagcattttggtcaaaaccattcaacaaatctctaggaagctccaaactttcccacatcttcctgtcttctgagccctccaagtctctaggaagctccaaactttcccacatgtttctatcttcttctgagccctccaaactatttcagcctctgcctgttaaccagttccaaagttgcttctacatttttgggtatctttatcgtagtaccccactctagcggtaccaatttactgtattagtcccttttcttttttcttttctttctttcttttctcccttcccttcccttccctttccttcccttccttccttcctttcttcctttcttctttctttttgagatggagtttcacttttgttgcccaggctggagtgcaatggcacaatcttggctcaccacaacctccacctcccaggttcaagttattcttctgcctcagcctccagagtagatgggattataggcatgcgccaccacacctggctaagttttgtattttttagtagagatagagtttctccatgtcggccaggatggtcttgaactcctggcctcaggtgatccgcctgcctcgacctcccaaagtgctgggattaccggcgtgagccaccgtgcccagccattttcatattgctaggaagaaatacctgagactgggtaatttttaaagaaaaagaggtttaatggactcatggttccacatggctggggaggcctcacaatcatggtgaaaggtgaaggaggagcaaagtcacatcttacatggtagcagtcaagacagcatgtgcaggggaactgccctttataaaaccatcagatctcatgagacttattcactatcatgaaaacagcatgggaaaagcccacccccgtgattcaattacctcccactgggtccctcccatgacaagtggggattatgggagctaaaattcaagatgagatttgggtggggacacagccaaaccatatcattctatgtatctatgtgtctgtctataatctatctgttatctatgtacctacttatcaatctatatatatatagagtttttatatattttttaatttttaatttttgtttttgagacaggatcttgctttgtcatgcaggttggagtgcagtggcaccatcatagctcactacagccttgaactcctaggcccaaggatcctcctgcttcagcctcctgagaagcggggactacagcacatgccactgtgcccagctaattttttatttttcatttttgtagagatggggatcttgctttgttgcccaggctggtctcaaactcctagcctcaagcaattctcctgctttggcctctcaaggtgctgggattacaggtgggagccacagcacctggccaagggaaatttgttataaagaattagcttatgcaattatggaggcaaatcccaagatctgcagagtgagagggcaaactggagacccaggagagctgatgttgtagttccagtctgaaggccgacaggctcaaaacccaggaagagccaaatgttccagtttgagactgaaggcaggaaacaaacggtgatgtcttagttggaaggcaggcaggcaggcaggaggaattctctcttaacttgggaaaagtgagccttttcttctattcaggacttcaaacagattggatgtggcccacccacattagggagggcaatccgctttctcaatctaccaattaaaatgttaatctcatccaaagcacccagaatagaaacacccagtaaaatgtttgaccaaatatcctgtgacccagtcaagtggacacataaaattaaccatcacacaggataagatagaataataaaggagacacaacactgaatgaatacagtggtgttagactagtgtaggaataagtggctttacacaccacagtcctcctgccaacaatgccacgtgactactcccatttactgtgcccactgatgaaaagagcagggaacagctcatggggaagaggtgaattctgttttcagtgcactaaatttgaggtggatcaggtgagagtcttgatctatggattttaggctctctctgcttagccagaggaggacgcattctctctttgcccacagtgaccctggaacattccttgtggccagcctgaggactcttctgaccaagtcttctgggctaagtttcttctgcatcaactaactcggtgattttcattcatttcttcatttctttactcacccagcatctaaaaatctttgttcttgatgctgggaaaatagacatgggagacacaaatcaggcatttgctagtctggtgggaatgatagagaaagaagaactgagagcatgtgggatgtgctgagattataagttagcactggatactgtacaagaatgtaccactggatactgtctaagtcagcccaaggaggccagagggagatgtcaagctttagcagtgctttaagaaggactagattctagccagggagttgggtcagaaagagcaattttgacaaatgtgaatatatgatcccatacaagacatggatgcaaaatgtcgtcacacatttaggggaactataagagtttggctggaagtggctcttagccctggctgagctttggaatcacttgggaacattacaaacgtactgatgcctgagttctacccccagagattttggtgtaaatggcctgggatgggacccaggagtcagtagtttttctaaagtgttggcaggcctgaggacaaggcatgtaagagaggctgatggagaacttaaacttggagagagcagaggagtatctcttctgggatgtggtcaagaatctgagcccactttgagggtaggaaacactgtgcagagctcagcagggaaataaagacctgctgatctccaactggggcctcgtctgcccttataactgttccttttgagcttctgtttcttattccccatttaaaagtgaaagtcaactgggaaataacaaaacatacaataaaataaaataagctgaaagattactcaataaaaagaagcaataaaatagtaaaagcaggcggatgcagtaaaacccccaaaactcaaccagacagaatcaccaccaagggccaggcaataaaaacaatagctaaaatgtactgctccaagtggtaagcatcttcatgcattgagacacttgagattcaccaccaccctaagagggagggatggttattatttccattttatagggaaggaaaacgtggtttggggagatgaagtacagtgctcaaggttacagtgggcagggcagggtaatgactccatttcaatgatgagaagtggaggctaacttgccaaggctagttagccagttggggcagagcaagaaattgaactgggatttctaactcaagtacaaagctcttccctcccccacctccaataaagcccgaagactggctgcatgtgggagtcatctgggaagctttaaagacatattgatgccaacagacatttcttcaaagaagacatacaaatggccaactggtgtttgaaaaaatgctcagcatagctaatcaccagggaaatgcaaaactaaaccacaatgaaatatcacctcatacctgtcaggatggctattatttaaaaaaaaaaactaagacaagtgctggtggtgagggtgtgaaagaattggaacccttatgcactatgggtgtgaacagaaaatggtgctgctgttatgaaaaacagtatggagcctgggcatggtggctcacacctgtaatcctagcactttgggagcctgaggcgggtgggtcacaaggtcaggagttcaagaccagcttggccaagatggtgaaaccctgtccctgctaaaaacacaaaaattatctgggcttggtggtaggtgtctgtaatcccagctactcaggaggctaaggcagagaattgcttgaatgcaggagatggaggttgcagtgagccaagatcgtaccactgcacaccagcctgggcaacagagtaagactccatctcaaaaaaacaaaaatagtgtggagattcctcaaaaaattaaaaataccatacgatccggcaatcctgttttttggtatttatccaaaataattggaatcatgatctccaagagatattggcactcccatgttgatatggtttaactctgtgtccccactcaaatctgatctagaattttaatccctacgtgttgagggagggacctgtaatccccatgtgttgaagtagggagggaagtgattggatcatggggtgggggcagtttcccccaggctgttctcttgatagtgagtgagttctcatgagatttttcttttttttttgagactgagtcaggctggagtgcagtggcatgatctcagctctctgtaacctctgcctcccggttccagcgattctcctgcctcagcctactgagtagctgggattagaggtgcatgccaccacacctaattttttttgtatttttagtagagatggggttttgccatgttggccaggctggtctcaaactcctggtctcaagcaatccacctgccttggcctcccaaagtgctgggattacaagcatgagccactgtgcccagtcagagttctcatgagatctaacggttttctaagcatctggcatttcccctgcttgcacttctcttgcctgccaccatataagatttgcctacttcccgtttcaccatggtggcaagtttcctgaggcctccccagccatgcggaactgtgagtcaattaaaccttgttcttttataaattacccagtctcaggtatttctttatagcagtgtgaaaatgggctaaaacagtaaatacaatgggggtacaggcattgggtaaatgtttccattccaaatgggagaaattggccaaaacacatgggctacaggccctatgcaagtccaaaacccagctggtcagtcattaaatctcaaagctccaaaatctcctttgactttatgtgtcacatcaaggtcatgctgatgcaagaggtgggttcccatggtcttgggcagctctgcccctgtggttttgcagggtggagcctccctctcggctgctttcaccagctggcattgagtgtctgtggcttttctagttgcacagtgcaagctttcagtggatctaccattctggggtctggagaacagtgaccctcttctcatagctccactaggcagtgccccagtggggactctgtgtgggggctctaaccccacatttcccttccacactgccctagcagaggttctccatgagggctccacccctgcagcaggtttctgcctgcacatccaggtgttttcatacatcctctgaaatgtagtggaggtttccaaacctcaattcttgacttctgtgcacctgcaggcccaacaccacgtggaagccaccaaggcttggagtttgtaccctctgaagccatggccccttttagctctggctggagctggagtggctgggatgcagggcaccaagtgccaaggctgcacaaagcagcagggtgctgggccttgcccataaaattattttttcctcctaggactccaggcctatgatgagaggagctggcttgaagatctctaacatgccttggagacatttttcccattgtcttggctactaacatttggttcctggttacttatgcaaatttctgcagctcatttgaattcttcctcagaaactgggtttttcttttctaccacgtggtcaggctgcaaattttccaaacctttatgctctgcttcccttttaaacataagttaaaattccaaaccatgtctttgtgaatgcgtataactaaatgcttttgagagcacccaggtcacttcttgaatgctttgctgcttagaaatttcttctgccagataccctaaatcatctctctcaagttcaaagttccacagatctccagggcatggtcaaaatggcaccagtctctttgctaaagcatagcaatagtgacctttgctccagttcccaataagctcctcatctctatctgtgaccgcctgagcctgggcttcattgtccatatcactatcagcattttggccaaaaccattcaacaaatctttaggaagttccaaactttcccacatcttcctgtcttcttctgagccctccaacctgttccaacctctgcctgttactcagttccaaaattgctttcacattttcaagttatctttatagcagtgccccactacattggtaccaatttactgtattagtccattttcacactgctataaagaaatacccaaaactgggtaatttataaaggaaagagatttaattaactcacagttccacatggctggtggaggtggctcaggaaacttacaatcatggctgaaggggaagcaggcacgttttacaaggtggcaaatgagagaagtgcaagcggtagaaatgtcagatgcttagaaaaccattagatctcatgagaactcactcactatcatgaaaccagcatgggggaaaccctcccatggtccaatcccctccctcccttgacacgtgggaattaaaacttcctcctttgacacatggggattgcaattcaagttgagatttgggtggggacacagagccaaacaatatcacatgttcattgcagcattgttcacaaaagccaagaggtggaaacatgtgtccatccactgtgatatggtttggacatgtgtctcctccaaatctcatgttgaaatgtgatctccagtgttggaggtgggtcctattgggaggtgtttgggtcatggtggtggatccctcataaatggctttgtgctggccttgtggcaatgagtgagctctcatcctattagttcatgcaagagctggttgtttaaaagaacctggcatctccttccatctctcttgctccctctcctgccatgtgacatgcttgctcccccttcaccttccaccatgagtaaaaccttcttgaggcctcgcagaagcccagcagatgctggcaccatatttcctgtacagcctacagaactgtgagccaaataaacttcttttctttattaagttccccagcctcagatgttcctttatggcaatgcaaaatgagctaacacacacagatgaatggataaagaaaatgtggtatacacacaaagtggaatactattcaggcttaaaaaagaagaaatttctgacatatgcaacaatatggatgagatttaaggacaatatgcaaagtgaaatatgccagttacagaaaaggaaataattctacttttatcaggtacctagaatagtcaaattcatggaatcaaagagaggaatggtggtcaccaggggctggcaggaggagaaaacagggagttactaatcaatgagcataaagatccagtcaggtggctgggtgtggtggctcacgcctgtaaccccagcactttgggaggccaaggcaggtggatcacctgaggtcaggagttcgagaccagcctggccaacatggtgaaaccctgtctctactaaaaatacaaagattagccaggcgtggtggtgcatgcctgtaatcccagctacttgggaggctgaggcaggagaatagcttgaacgcagggggcagaggttgtagtgagccgagatcatgccacttcactctagccctggcaaaagagtgaaactccatctcaaaaaacaaaaaacaaaaaacaaaaaaaaaaaaagaaaagaaaaaaagaaaaaaaagaaaatccagtcaggcaagatgaatgagctcaagagagctgctgtacagcagtgtcctctacagtcaacaataatggattgcatattaaatatatgttaagagggtagatctcctactaagtgttcttacctcaataaaaaaatgaaagaaaaaaatactggtgctgatgctgggccatccctcaattttaacttggttgtcctggggtggggcccagacagatagggtggacatggtgcaaccagacacttttatggctgtgctctgcacttagtagtaattactattatttattgagcacctggggtactaagcactttgttgctgtttcattgagccttcctagtaccctgtgaggttggtgttgtcatccccgcttgagaatcaaggaatcagaaagtgaggctgttttctctaggtcatccacctggaagtcactagcgcctgtgttcagccctggtcagcctgaccccaaagcctatgctctagctgctgtgctgtgggactcaggctcctgtgggacacagacgtgggcaccacatgccctttccttccaattctctgtcctttaagttttagggtcaatagggtaacctttgccctgcacctgtccacactgaatggccatcatccaggtggagaagggagtggcttgtggctcagcattaaggaagaactttctggcactcaaaggagcttcatggtgagatgggcagcctggaaaagcagagggcaaccaccaccatccctaggaacccaccaccatccctgggcacctacccccatccctgcacatccctcacaatccttgggcacacatcaccatctctgggaatctaccactatccttgcacacttaccaccgtacctgcacactgaccaccatcctacacactcacctctgcctctgcgcacccaccgccattcctgaacatccaccaccatccctgggcacccaacactaccatccctgcacatccaccactgtctctgaacacccaccaccatccctgcacatgcaccaccatcctggggcacctgctaccatccttgggcacccacttccatccatgcacacccatcactgtgcctgggcacccaccaacatccctgcacacccaccaccatcctggggcacccactgccatccctgggcacccactactgtccctgcacacccaccactgtgcctgggcacctaccaccatcactgcatatctgccaccatccctgggcacccactaccatccttgcacatccaccactgttcttgcacacccaccactgtccctgggcacccaccacaatgcctgcatatccaccactatttctgggcaccaaccaccatccctgcacatctatcaccatccctgggcacccaccatcatccccgtgcacccactaccatccctgcacacacaccaccatctctgggcacccactaccatccttgcacacgcaccactgtccttgcacacctgttaacatccctgggtacccatcaccatctctgtacatccatcaccatccctaggtgtctaccattatccctggataatcatctgaaagatctgttgggagaggaagtgtcatccctcagtgtagtgtgtgtgtgtgtgtgtgtgtgtgtgtgtgtgtgcgcgcgcgcatgtgtgtatgtgtgtgtgtgtgtggggcagagatgtgcaagggggctgggattagatatcctgctctgcctctggaccctgagtggaagggctcaggtgggctagtcaaagctctgtggtggcgctgtttgtggaagatgagctcacagagctggagttctagaaggccctccgttggcctggagcctgccttccccattgttctcttaacactgggtgcctggggccctggcaaggttgtgggggacatcttgagctgaagcagggttttgagccactgctgctgctgccattgtcaccatggtctcagctctgcggggagcacccctgatcagtgagccccctttcccttcttcctggggctgttaacaggggcgctgggttggtctggccagagaccaggtggagaaaaacaaggtggtggttagggtggggttatcctggcctggaagagtgaccagctgagagaggagagagagagagagagagaaactctggagctgttgtgaaatgctcaggatggaattccttttaagtcacttttctacaaaaaaaaaaaaaaaaaaaaaatcaaaaacagtccatgtgtagcagtcaatttagtttcctcctctacaacttagggatattaaccccacacctttcaattgctgagaggattggatgagattaagttggaaaagctctgggaaaggcctggcacagtgttcaaagacttgacaaactccaccaggttggctgcctcctccttctcactcccctcgcggtgagaagaaggtctcatgtccctgtggccacgccttttgtggacttgagtttcagaagcagccacagagcagctactccatgccagcaactctgcagataaataagacatgcagataaataagaccagccgccgttcttcagaagttaactttgtggtgggaaagactgacatctattccagcctcgtgtgacagaggatgtggaagatcgggtgtgtgagagtgtggggggtggtggcatgccaggagactctcactggggaacacacctctgataagacccttcaagtatgagtcagagttaaccatgtagaggaaaggagagggtgaatgttctagaaagcaaggtcattgtgagagaacaaggtggcactgctgaaacataacgtgtgaatgagggagtgggccgcagggctgggctgtgaagggtcgtgaagggccgtgtggacctcgaaggggcagttatggtgggagccatccaaggtgtcacagggctgggcttttcatttaacaaatttgttctgatggatgtgtatagaatagcttggaagagtggttgagacatgatacaagaagaccatgaaggaagccaggatggaggtgtgaacctaggaaaggacggtgctctcggagggaaggtggaatccacaggacattgggactgattggttggaactgggtgaaagatgtcatggggaaggagtgaagaatgacattcatatttccagtttgggtaaatgtgtggcccatcatgttttaaagcacataaggaaagtcacaaggcagaagaaggcattgatggaaacagtggttctgtttagatgtgctgggtttgaggtgcctgcagggcattcaagtggaagtgtcctgccagtagctgcctctgaggtcttggggaagatgccacaggggttgccagccttcaggcggtggctaacagcagggctgcccagggggtttcctcaaagtggaagagaagagggctcaaggcaggaaggccttagaaagcatatcagcgtttatggcctgggcagaagtgaattccacggaggataaggaggagagtcagccagagagggaggaggaaacctgggagaagggagcatcgtggaaaccaggagaggcaagcctttcaacagcgggtggcggacggcatgagtacagctgagagctcccatgagacagagtcgaagggggcctccttggacccgcagagcagtttcagcgcgcggtgatggcagggaggccaattcaccaggttggaaaacaagcgggagggagaaagtggcgattttccccaggagtttgggcgagaagagggggaaagagacaagggagtagcagtcagcatgagacttgagggaaggcatttagaagatggagactgagaaagtctctacgagcaggggaaggaggagcaggaggggaacggtgctagcgcgccgggagaggagggacaacggatggagcaaggcttggtgatgggaaggacaaatctagagcttagagggaagatgggcctgcatgagattggaggccccgtacccaaacaatgacggggtggagatgagggcgaggaggctactgatgagtttgcaagtgagcagggctaaggcagaaagaggaagaaattccacaagtgagcaccttgcttttcttagtgcagcaggagacgagatcatgttctgagagccaaggggtgggacagcgtggcgtgctaaaggacaatactgagggttttcatttcctgtgagggaaatgggagagagaagtctgagcagagacaagcgcgagtaccagtgttagttgtagttcataacagaaacaacaactcacttatttttagtgccaagagctacgctgtgcccacgccttttctcatttattcttccaacaatcatatgaggcaggtgttactcacgtcctcattttatagaggaagaaacaagcctcagggagggcccaaaatcagagatggagcaaggagcagaggggggcttccaacccgaaccttgctgcaaagccatgacctcaaccactttgtcatcctcgggggcattcaaggtcccgtggaggttggagaccagggacaccaattggcacaaacaagagtttgtacaactctttcactttttgactctgtgaaggtggagagcaggtgtggaggcgcagaggtcaagagaagcatgggaaggcttgtcagaggtggtgggcagtgggataggagctcacagaggtggggaaatgcgggtgaggacaagaagcagggatgaccagggcaggggagggactggctgagacacagaggaactggaggggactaggtctggggagatgaaggagccctgatgctgtgacacccaggtgctaatgtcctctgtgatttgggggactggccacacacagccaatgatgacagggcagggaggtcaaaccagacgggcaggctgggcttccagggagaagggctttttgcaggttatggtttagaagtggtggtgggggtggaggagactctcgggacatcttggggtcttgtgtgtggagaaagagcagcttccccttgagcgggctataggggagcagtgttctgggggagaccttgtttcagttaagatctggagatggagggtcaatgccagaagggctgtcccttgacagttgggctgagagacccatgaacacaccgcctggccatcccctccgggagcatctgctcagtggggctttggatttatagaactttgtctccatccaaacttcgccccttcctagttataaaatcttgggcctcaggactaaataatccgtaacgtgtaatatggagcttacaataggttagttttcttcctgtctctggcctgggtggtgtgaagcaggatggggaaggagaggggctggtctcggggtcagggtgatgctgatcaggaatgcaagggggctgatacgtgctgctggagcctggccttctgcccaccccttctctcctctcccctttcccaggggtgcactcaagccctgtttcttctccttctgtgagtggaccacggaggctggtgagctgcctgtcatcccaaagctcagctctgagccagagtggtggtggctccacctctgccgccggcatagaagccaggagcagggctctcagaaggcggtggtgcccagctgggatcatgttgttggccctggtctgtctgctcagctgcctgctaccctccagtgaggccaagctctacggtcgttgtgaactggccagagtgctacatgacttcgggctggacggataccggggatacagcctggctgactgtgagaacccctctccctggcgggccctgacttccccacacctccctccctctttccctccctctctccttctcattcaagggctgtggcttcgggagcttttagagcccttctgtaaactgaagatgatttgagatggcaggtagagaacagccagcacggagtaaaacacgcagtaggcaggcagcaggcaaccaaattggagtcaccccttcatttccccctgctgctaaagtcggggtcaaaggaaacaaacagctcagtcccctaaacttaactatggccacaaggatcagacattccttctgaaattagaaaagacaaactgaacagagcagtcatgccaaacttttcaagctggtggcagttttagatggccatgtgggaagggcagtcataccggggctcatctttctaacaggtcgagcaccctctatagattccacctgggtcttcctaatcttgttactgaagatttagcacttgtaggctgggtgcagtggctcaggcctgtaatcccagcactttgggaggccaaggcaggtggatcactctgaggtcaggagttcgagaccagccaggccaatatggcgaaaccccgtctctactaaaaatacaaaaattagctgggcatggtggcagctacctataatcccagctgcttgggaggctgagacaggagaattgcttgaacccgggaggcagaggttgcagtgagctgagatcacgccactacactgcagcctgggcaacagagtgagactccgtctcaaaaaaaaaaaaaaaaaaagatttagcacttgtagattcattcaacaaatttattgggccctactatgtgctgaacaatgagataatgggaagactgctgggctaaaagtcaagaggcctgaggccagccccaacccatgctatttggtagctggatgggaccctgggtgagtcgctgtgcacctctaagcctcgattgattggtttgcaaagcaggtgggaggcacctgccccaatcaccttgatcaggcaggagaggctcggtggagccagcgtgggacctgtgcagtgagcaccctggtctggggtggctgtaaccatctgacccccaggcctatgctctgccctatgcaggggtctgccttgcttatttcacaagcggtttcaacgcagctgctttggactacgaggctgatgggagcaccaacaacgggatcttccagatcaacagccggaggtggtgcagcaacctcaccccgaacgtccccaacgtgtgccggatgtactgctcaggtagctgggcctgggcccagggctggcaggagtcaggccctgcattagcttttgttccattcccagtttagtttgctacccccatctctgagtgagggttcccccacatcaggctgggcccacggaggagagggagatgggacaagggatgagggtaggtcttccatcagtctgaattggggtcccagataggagactgccttagggctataggaatggagggaggattgtttctgatggagggggagagggatagggttgtacctgtgcttccggagtggttgagacaggattggatttaggcgagtggagtgtgtgtgtgtgtgtgtgtgtgtgtgtgtgtagagagagagagagagacagacagatacacactcacacacacacacacacacctggatgtctcctgttctctcattgtgtttctctgcctatcaccccagatttgttgaatcctaatctcaaggataccgttatctgtgccatgaagataacccaagagcctcagggtctgggttactggtaagtaacttgggctggagccccgcagcggtggtatggttaggactggtgggcagcagcagggaacaaacccctttccttcctcacttctggtttagagaccacactctccttcttgttcttctctgggcggtgactggcaactgcagctgatattatctctcctcttccctgttctccatcctcagggaggcctggaggcatcactgccagggaaaagacctcactgaatgggtggatggctgtgacttctaggatggacggaaccatgcacagcaggctgggaaatgtggtttggttcctgacctaggcttgggaagacaagccagcgaataaaggatggttgaacgtgaatatggctctcagctctcagtgtgtctgcaggtgccatgtcagagccagagcacctccgttttccctcacctcacctgtccgcttgggctgggtttccagtggactccagaaagcccagcaccagaggcttacctccatttctggtggcctgtgggcaggtgtttggggggggcaccagtgcattttttgtctaccacacctggcaaaatttgggtctagggtggccagatttaacaaaacaaatacataagaaacaacaaaaacaggatgccccagtttaatttgaactttggatatacaacagataattttaagcatgtccaaaatattgcataggaacatatttatattaaaactatttgacgtttatctaaaatttaaacttaactgggtgtcctatgttttacctggcaaccctagctggatctagggctgtgcacctctggcttgattgggaaggttcttgggacactttttttctgcagctttggttgcagatggtggtcactgtgctttggccctccagctgtgactactaacacacacccctgccaagccgggggtgctgcttggtcgcgggagaagaatgaccacccggagcttctgctttcaccttgctctctggtgccctctcgtggcggaagattcaagtgccgctgatagagacggtgcgctcactttgcccactactgctaggagtttggaggatgggacgggagtgaccgtggctttcaatccgcacagccagtgcagccttctgccttagtcagcacacgagaagcccagaaaaagatagcgcggtcccctgctaatctgggacgactgcctctaaaggaggaaggtgggtgggtctcaggatcgcagtggatgtggtggcagcagcagcagttgcagagataggatgatgtgtgagaagcctgagccctgagttcagactgtagattcttctgaaaaggttccaaagaaacctgtaagcactgaactgttggttgaggcatggctggtgactcttagggagaggaggggacgacactgtcgccccccaccatcctcctccacctaattcagccaccctgaatgcctccgggtcagcatacaccagaggggcgtggaatgtccacaattagcgagtcaggccagtttccttcccctgctggtctggtcaagatgatgatgaaacttgagagcgactcatgcaaggggacagagtggtgaagaaccctgctggcagtaggggcatcaatgactaatggagctattaaatcataagtagggagaagctgctgtctttttaacatcaaggcaaacacggtgtgcctaccatgtgccatgcattatctaatctagaccctagaacaatagctatgatgcagctaccattatgaccaccattccacagacaaggggaaacagaggctcagatgagataaatttgcacccagctcagtgtgactccacatgtacgcttactcactgtactttgccaaggggttgttgttatggtcatctggcctgggacccatgacccatccatctttcttttttttaaatttattttttgtaagacaaattaaaaattttatttatttttatttgtacaactaatggggtacctgtgtgattctgttacacatatagattgtatagtggtcaagacagggcttttaaagtatccctcatctgagtaatgtacactgtccccattaagtaatttttcattgtccacccccctcataccctgcattgttctgaatctccattgtctattattccagtcctttttttttgagatggagtctcactctgtcacccaagctggagtgcagtggtgcgatttcagctcactgcaacttctgcctccgaggctcaagagattctcgtgcctcagcttcctgagtataggtgcccaccaccgcacctggctaatttttgtatttttagtagagatggggtttcaccatgttgaccaggcgggtcttgaactcctgaccttgtgtaatttgcccaccttggcctcccaaagtgctgagattacaggcatgagctactgtgcccggcccctattattccaatctttatgtccatgtgtacacattttttcacacccacttaggagtgagaacatgtgacatttgactttctgtccctggcatttttgacttaagataatgacctccaattccaaccatgttgctgcaaaagacatgatttcattctttttttagggctgaatagtatgccattgtgtatatacatcaaattctctttttccattcatccattacacttaggttggttccatatctttgctattgtgaatagtgctttgataaacatgaatgcaggtgtctttttgacataatggtttcttttcctctgggtagatacccagtagaaggattgctaaattgaatggtagttctacttttagttctttgataaatcgccatactattttccacagatatgttaatttacactcccactaacagtgtataagagttcccttttttctgcatcatcaccaacatttgttgtttattgcctttttaataacagatattctgattggggtgagatgatatttcattgtggtttaaatttgcatttctctataatcagtgatgttgaacatttttcatgtaactgttgaccatttatatatcttctttaaaaatgactatttatgtcctttgcccactttttttttttttttgagaaagggtcttgctttgttgcccacgctggagtgcagtggtttgatcatggctcatggtagccttgacctcctgggctcaagcaattctcccacctcagcctcctgagtagctgagactacaggcatatgccaccacacctggctaatttttgtttttttatagagacaaggtttcactcttttgcccaggttggtctcgaaccctggaacttaagcaatcctcctgccttgacctctcaaagtgctgggattttaggcatgagccaccatgcctggcttgcccactttttaatgggattgtttctgtcgttgagttgtttgagttctttgtatatgctacatatgagtcccctgttgaatgaatagtttgcaaatattttctcccattctacaagttgtttattctgttgattatttcttttcccgtgcaggatctttttagtttaagtcccatttgtctatttttcattttgttgcctgtgtttttgaggtcttagtcataaattatttacctagactaatgttcaggagagttttctctaggtttccttctagtatttttatagttgtgagtcttacatttaagtctttaatccatcttgaattgatttttgtatatgatgagagacaggggtcgtttcattcttctgcacatggcagaagttttcccagcaccatttgttgaaaaaagcgtcttttccccaacgtatgttcttgtcagttttgtcaaaaatcggttggctgtaaatatgtggccttatttctgagttctccaccctgttccactgatctgtgagtctgttttttataccagtaccatgttgtttcggctactatagccttgtaatataatttgaaatcagataatgtgatgcctctggctttgttctttttgcttaggattgctttggctatttgggcccttttttagtttcatataaattttaggattttttttctaattctctggaaaatgatgttggtattttgatagggattgcattgaatctgtagattgctttgggaagtatggtcgttttaatgatattaattcttccagtccatggtccaaccatccatctttgaaggattcgtgccttctacttcaacttcagacttctgttgcctgcctggcctggttgcttcactgggtcccattcagcttgtctgggagaggagcccaggaataggtgtagtgaagctcttggaaccaaagagaacattgttaaaggatttgggggctgtgagcagtgatgatggccacagtctcttcaagatggggctggactgggatcaggcctggacaagggaccctgaaggcctgggctgggtggttgaccaggagcaggtgaagacggagctggagaaggagtatttagggaagagggccctgatcaaagccagggaggcctcccttgttatgagggctacagagtgtgcaggcccatctgaatgtagaggccaggggagcctctatgttcagagctcagctcctgaaggacatgctcaggttggtgagagtaaccaggccatgtcctggtatctctctccttccacgtcgctcaccccacttaccatgggccattaagtcttacctcttttactttctttatatctctagaaactctccctcctttctatccacatgcagctgctttaaatcaagtcctcatcacctcttcccaaggacgattgcaatggcttcctaagagtgttcgtgtctctaaccttggtccttgcaactccacctcctccctcagagtgagctttctatcttgtttctgccttgcatcctaggcccaatagcttttcttatcttatagggttaaagttcaagttccttgggttggtatacaaggtctttcatgaccaagactcagctgactgctacagattcaactctcacctgttcggaaacttttgctctagctagtttgtgtccttggcggttagtttcctgagggtagcatgctgcttcacgcctttcattatcaccgatcattcttctcccattcattacactctgtcccttgaatgcaacaagctgtttgcaccacagggtctctgtacctctctcttgtcttcctggaattttatttcttcagatctttgttttgttttgtttttttgaatttcaagctgtaagtttttttattacagaaaaaattttggtgccatgtgtttgtggtatcgagtgagtagaatacaaagataaccaaaggtaaccagtgttaacccagggctcacttgttcacactttaaatttccagtttcttaaatagatttaatttttggcgttagactcctatcctagctgtttgattgcttgatacataattaaaaccaaacatgtctaaagccacactccatcctcctgaaacaatatccttaccttacttatgttaattttagtattcttcttccagtcactcaaatttgaaaatactgtcatctttgactttttcctctccatttgccacagccatcctataaggtctctgtaatatcttcaacttccaccgccctttcagatcttgttgcttccagtcaagtttgaactgtgcctctcacatagtattcttttttttttaattatactttaagttctagggtacatgtgcacaacgtgcaggtttcttacatatgtatgcatgtatacatgtgttttggttttttgagatagggtctcactctgttgcccaggctggagtacagtggtgcgatcatagctcactgcagcctcctgagtagctgggactacaggtggacgccaccacacccaactaatactttgatatttttgtggaaatgcatttcctcagacctttgggtgacgctccctttttcttcagtcaggtcttgtctcagtttcacctcctcaaagtgacttctctgattgctgtagctgaaggagtctttcccctctttgtcactatcttggcactacagcatgctccattatctgaaattattccatgcacctctgaatttatgtatatccccttttcacttgcctatgctagattgtaagcaccatgggggcagaaaatttgttcgttccttatatgtctaccacctagaatagtacctggcacattatactcaataaaaaaaaaagaacctgttgaatgcatgattgatgcatgaatgaatgaatggtaggcactcagctaatgtttgcagaatcagtgagtgaatggggcttgataccatctaatatgcaacaattgattcaatgatattacttaatcactacctatgtgccagaccctaggcatctctccagatggacccactgccaccccctgccccatgcccccggggatccctctcttggggagactctctatccctcagccaggtaaccaccctggctgcttttcatacaagtcctgcctgcctccttcttgcccatatgtggtgtagagggagctcagcatggtttgggcagtttggcagaggtggagcaatggggttttctcctttttcctagccacctgaccttgggaaagtcactccacctctcagagctcagtgttcctcatgggcaagaggagcaaatgaaggccaccttggaatattgtatcaattgcacctgtaatctatcatcgtaatccataatatagagcagcgacgcgcccagcatagtgcctggcacagagtggggcttcagaaatgctggctcatctggttttcctgagctctgggggtagcaagttccaacctacctggggaggaatgggtgggaacaggacatgcctgccccagtgaccagggcttccttaggagacctgtactgtgtccttctcattgtttgctaagaagagaaagagaaaggggaaggtgtgaggaggagaaggaggagaaggggaatggtttgggaaaagtagtagacagtcctatggaaagtaggggagaattcaatgaatttttgttacttttcgtaagtctcccccttcttggattagtttggctgcaggagacagatttaaaatgggcttttctatatcttttgtgctaagggtggattgaatgttcctggggatgattggcttgctaaggtgctgtcccttctctacctgtaggtacaggtgagggtggcagaggcccctggcagctgaaggaggctttgcggggtgctctttctgtgtggtccatgccctcagctgggtatggtggtttttctccactctgagcactggcctgaagcttctagggtagggaaactgtgggaggtgggccagtcagagggcacccagaatttcctggaccccatcacctctgtgcctatggcagacattgcaaactgagtacaagcctttgtctttactgagctggcatgtgtccaggaatctttctttttttttttttgagacagagtctccctctgtcgaccaggctgtagtgcagtggtgtgatcttggctcactgcaacctctgcctcccgggttcaagtgattctcccacatcagcctcccaagtagctgggactacaggtgcgcaccaccatgcctggctaatttttgtatccttagtagagacggtttcatcatgttggccaggttggtcttgaactcaagtgatctgtctaccttaccctcccaaagtgctggaattacaggtgtgagccaccacgcccagccaaggaatctttcttgacagttcaatggtagtcactctcgatggagttggcatgtagaatgggacctctttatcatctctgacctaccctatgttggccatcacagcagcacagcatccggaggagattgagatggtcatccccatttttaggaggaaactgaacctcagagaagttctagagcttgcccaaggaagcacagttggccggagctgggacttggatggggctgccaggttgccaaggccatgcttcatcctcagctgtcccagctgccatagctgcactagcacttggactctcagcaggctgccccctggagtgggaaggcacagttgaggggtggggggcagtggagagatagcccacctatccacaggggatccatcattctccaagccctccagcttctcttctgcctccaagtctctgcccaggtatctgttctgcaaacttgcttgcctggcaacttctacccatctctcaaggcttcagtcaaaacctgctccgactcagccaaccagacccaggtgtttctgccgcaatgagcacactgtgccctgggtacctttgtagctcttgctgctcaagtctttctttctttctctctctcttatttctttctttctttctttctttctttctttctttctttctttctttctttctttctttctttcttctttctttctttctttctttccttctttctttcttttcttctttctttccttctttctttttctttttctttctttctttctttccttccttacttctttctttctttctttccttccttctttctttcttttctttcttccctccctccctccctccctctctctttctctctctctttctttctttccttctttctttctttcttttcttctttccttctttttctttttctttctttctttcttttctttctttcttccctccctccctccctccctctctctctctctttctttctttctttctctttctttcttttctttctttcttccctccctccctccctccctctctctctctctctctttctttctttctctttctttcttttctttctttttcttttctttctttcgacggagtctctctctgtctccaggctggagtgcagtggcgcaatcttggctcactgcaacctccgcctcccaggttcaagcgattctcctacctcagcctcctgagtacctgggactacaggcgtgtgccaccacgcccagctaacttttgtatctttagtagagacggggtttcacca[137 bp omitted]agactgtgtcttcttgatatatgaattcccagtacctaactcagtgcctggcacatagtgagcacacagaaaatgcttgtggagtgatggggtcagggcagagactccagcatggtactgggaagtttccctccgggaggctggttgagctgggtgtgctttggtgcccaccaatcactttgtattgggcctattttaactcagatagaactgcttttgtaaagaagccacaaaaggcagaattacactaaagacaaatggcctataatggtgataagtttgccacttccttcagaggcatgggggagagaacagcttcaaggaggcaaaaaatccaaattctccaacccaaagcatcactcacagtcattatcagggggcggattttcttttcaacaaaaagcaaaacaccattgtggccttgctcagaaacaaatgagatgtcagcagtggggcatgtttggaggctcagtggcagccagcgaacattatgcatgcattcccgggtgcagggcatgcagggggcatgttcttgaagaaccaggccatgggggtgtctgcaaagtggacgttatggttgcttcttatgtacacaggtcttttccttcagccctcgaaatctccacatgcataaaataattttatgaaatcacgtttccaagtttttctgttcatattcattttctgctcgttcattcattttgccatctgtgagaacgcacaagctgcagcaggtgccaaaggtttaaaaaaattatgggagaaaacaacactgatcaaatgctatctatccttttattttttcttctttctgtaaattgaaaaatgacagtcattatgtgattttaggagaagaaatgttggttgcattttgtggtactgtggcgttcttttggaggattgtttagcactttctcgatcagggtgactttgcctagcatgggtggacccctagaggatcacagatgggctctggggatccataaccctcctgaaattatatgcaaaaattttgttttgttttgtcaagtagctggcactacaggcatgcactgccacgcctggctaattttttgtatttttcagagatggggttttgccgtgttgctcaggctggtctcgaactcctgaagtcaagtgatcctcccacctcagcctcccaaagtgctgggattataggtgtgagccactgcacccagcttgtaggcaaaattttacgtatatctatgtgaccatgtgcaattttggggggagagaatttacagcttcatcttatttttaagagtcagtgatccaaacaagattaaacatcaatgttctacgggaagaaaagagaaaagaagaaaagatagaaagtgttttatacacttaaacttatttaatcctcataataagcctgaaaactaagcatcagcatttctgttttatagatggagaaatgggggctctgagcagtcaattaaatatttgcttagatgcctgacattcacttacaacttcaactcatagactgttagagtcgggaggcaccaaagggattatctgtccattttcatctccttcccttttgtagaggaggaaactgagacccatagaagtgaagtgaactgggcctaaagtcatgtg[142 bp omitted]tgaaacccgtctctactgaaaatacaaaaaattagccaggtgtggtggctggcacctgtaatcccagctactcgggtggctgaggtaggagaatcgcttgaacccaggaggcagaggttgcagtgagccgagatcacgccactgcactccagcctaggtgcgacagagccagactccatctcaataaaaacaaaaacaaaaacaaaaacaaaactcagtcttctgactttgaccaaagccttttccaacccactgctttattcttgaaaaacaagtgagtactggtttcatcaaatgttaaattgaattagtaagagattctcctccttccacctgtcctcaagcagggttgggtcctatagtcctgtttcatgtccccatgaacctcatgccccctagaataacctgttagccttaggaatacataaatgctgcacaaaaagatcccatgtgctaagaggctaagaatctccaatgagtggggagaaaggcattagctcaagaaatcaacccttggtttgggaaatgtcttcatagcctcttggggagcaaaggaaagagcttgaaggactttagccgtgacactcctctcagcatggtggccaggcccttcatccttcagcacctgcctacctctcatgccccttcatgtctttgcttgggttctcccggacctgtgtgcaatcccctgggctgtgcctcctccagcctcctgggcttcccatacgctgctctctcacttcccttcaactggaaaacccagattcatcttttgcagtcttctgtttacttgtcagtattccttgctcagattagaaattccttgcctcactgcaagtgcccagcaaggtagcagtcaatcatacaagggcatggcagatgcacctgggcccttcctgcatttgccccttctttcttcccctgctgccttccctattatgccagagagcttgttctgtgcagcggagggtctgccctggctgtgtgcgggtcagggttggctgcattctctcccgctgctttagcagttccttgccctctctgagcccgcttttctttgtcacatgggagttgattcattgggatcttatggaggccttcagccccgttcagggtttggttctcaaaattgaataaaaatctctgagcttgtggaggaagaggtttcctttgggcctgtgggctcaggtgggctgtgctgagctttacctgagggaacacattacccaccaggatcacacctgtgggcagggcctgcctgcgacgtcctccttcccagctcaccaagagccattctccagagaccctctgtctccccctcatcagtgcttgtggctccgcaagcttctcactagcagcgttcatggtgaaaactctcacaaaaatagcttcaagctggaacgaggaaaataaaataactccggcctgtccctgccaaaaacaagaaaacagtgtgcgagcaactagcccagtcctctggcaatggatgctcacagcgaggctcaatcatttcactctcttcagctgctgtacatccccaagatcccgtgtctggggtcatgtgccattaattaattaactaattaattgattgatccaatcctctgaagtcactgagaattcaaccttgtggtttggacttgtgattgctccaaactcctagccttggtgtcatcttttgggtcactcctgaaaatgggacaactccctgagtctcccttctccaccagacttccccaggtccacactaaggaaatgattgcacaaatagctacttgtttgatgggaggatcataaaaacactcccctacccactggaatttagactgtgtcttttgttaacagccaattaataataatcagtagctgcctattgatttgctctcttgaatttccttttttttttctttaaacaggtaaagaatgtagacctggtttaagccggacaaagccagaatcctcaaatccatatgggtgcagacatctgtgagccctgaagcaatccaaatgcatctaaatattctttgctctatcacaaatggatctaatttttttttctgaaaaggaagccagaaatccaacgaagcagttcaaattgtaatttaagctatagatttttaaaaaatttaagaagctgctaaactggaacgaggcagaagcatcagagagactcccgactaattgaacagtcatttcatttggttcctgtccctggtaggagcggtccaaggctaacctctggatccctgttcttctgtatctgacagtgtagataccagcagggcattttccagcctgatgtagtcgtgggtgagtttgtctcagtggagggactttcacactctggccaagtctggaaaactgatcactgtcagtccttcttgtttaaagtgagtcaccttggtgggtctacaaatggaattgtgaacctgggagtttaggggtatagcttcggcactgccattaactcactgtgtgaccctaggccaggccctcctctcctcttgagagtctgctcaattggaaaatgaggacattaagctacctgatccagcaggcctgtgggcctgtggtaatggcctccaaagatgtccccattctaatccctggaaccagtgaatatgtgaccttacatcgtaaaagaggctttgaataggtgattaatttagtaatcctgagatgggaaggttattctggattatgcagtaggcccagtgtcatcaaaagggttctttaaaggctgggcatgggggctcacacctgtaatcccagcactttgggaggctgaagtgggcaggtcacttgaagtcaggagtttgagaccagcctggccaacatggtgaaatcccaagtctgctaaaaatacaaaagctagccgggcatggtggtggatgactgtaatcccagctactcgggaggctgaggcaggagaatcgcttgaacatgggaggtagaggttgcagtgagccgagatcatgccactgcaccccagcctgggtgacagagcaaaactctgtctaaaaaaaaaaattcttcaaaaatggaagagggaagcatgagagaagtcacagttagagggagatgtgcctgtgtggatttgtgacaggagaaggacttaacccgttatggctggctttgaagactgaggaagtggttgcaagccaaggaacgtgggcagcctctagaagctggaaaaagcaaggaaacacagcctcctgtagagcttccagaaagaaatgcagccctgctgacactgggttttagcccagcgagacctgtgtcagacttttgacctatagaactgtaagataatacatttgtgctgttttaagccacgagggtagtagttatttgcagtggcagtgatagaaaaccatacaagaccctttctggcaactttacactctctaagaataaaagctagcttagctaacagctggcagccccatctgggagaatgcttgggaggaggcatcacaggggtgctctgtcccagctgccttctacagtccccaggactgccagctcctggccatgcttgggcgtgagcatcccactgggcaggggaggcagtgctgttatggcactttgagtctcaggagatcatctggtcctgcatcttcccttcacacaggtaaggtattatcttcatccaaaaattgagggagctgtgcccagagatgtgcatggtctcacccactgtcacacagctactgagagaagaacgctgtggggccagggctcataactcctggtgggagactcttccatttgtcacactgggcaagtaacttttccttgtgttagcgggtcatgaaggagagacagacagatagggaggttggatggcagaacaggactggaaccctgaacccctggtctagccagtgctttctgagcacctgtgcttgaggggaaaggtacagccacattaggcctttcttcactgcttgaggagagactttgaggggggagtggtgggggccgggagggaaagtgaaagattaggctaaaggaactgctgctatggaaccagcatggtgctaaggatgaggattctgcctgatcaggaagttctctctcacacctggaggctgaaaagggcatgccctgtgtccgtaacaccaaaaggcacctcccaacctctcattccacctctaagaactcatggggagcaaggcagagtgccagtgtggcttctggggggacaaggcaggtcagtttgctgggggtggggaggccaggaaggctcgtgtgtgggagggaggccatgctggggcctgtgtccagcccaaattcaccgatggggtcaggaggggtcagggtagcagacagatcacagggggacacaaaggccttcttgatagtttccatgtctgagcagcattctccaggccacgtgcctgtgggtccagggcagcctccttcagaacgcgggctgtgactcatcagtgggacttgaagacatttacaaagttgtgagcaatctttaaaaaattttagaataaacatatagagtatgcacattttgtaaaagtaagtgttgttgcgtaaaactttacatatacacagtctgcagttttgacctggcaggtccgaccctttcctaggccccggagggagagagactcggatgtggagaaaaggcagaaataactcagccatttccacaagaccagcttttaatatgactgtgatttgaagcacgaataaataaatgccaaagaaaatggaaaaaccaaagcaaacctcagaacatcaaaactaaaataaaaaagcataaaatgaagcaaaacaaaacaaatctccatcggacaaacataaaagcccccctaccccagataaaaagaatcagactgtacaagctgtgtcacagggagagaagaacgacatgggcaccatgggtgaacacaggcgtcccccacccgctggctgctgtgccgccgtcataggcactgggggggagggaggttggcgcgggtcacctttggcgccgaagccccatgggcagcttggggaaaagggggtttttgggcaggttaagaactttcacaaacgacacaagaactgaatgtagcagagagtcccatgggttccctcttgattgtgcagttctgattccagggtggcctcatggtgactttggacctggaatctggtcccactgcacgggcagcagtgtggacactggaaaccgcgtggaggagtgtcatgtacaagacagacgtggaggtggcgccacaagaagtctgagcatgcaggtgctttatacatctggcagtgagatgtgatggcaggttcgttcttggacagttccagagtgtgactcatctctcctaagagggacgcacggcggggcccaaggatgcgtcgtgttggacgtggccggagcgaggtctaggcagctagtctgcaatgtgtgcatagggggctcttgcttctttccagcactggggccatcccacctgagcttgctgttccttgtcctgggtcttgggcctcaaggtctgtttggagggagtgctgggtgactcgaggggtgtcagcaggcaatctcctccaaggtccccagggtcgtctgcaggggcacgttcacagtgtgactgatggtttcagagtggtttggcattgtgtcacaagtactctggaagggaagggttggtgggagtttattattcgctcagcaaaaattcttcatgatgccaccagcggcccagcctaggccctggggaaggtgctccccacttgtgggctgcttctgctccagacatctgataggctagtttaccatcttgggggcatgaggctgaatggaatccttaccattgcacacctgggtgccccctatggcagtgagaaggctccctggtttgattggctgctggtttgatccctcttagaggtgcccctcatgtaactggacctatatctgagtggtctgtagctttggggctggatggtctgagtcctgacctctctcttgggggcctccctcggggctatggtgcaggaagtgcagcccatggctaagcctggggcagggaggacccatggctgaggccaagcagaaacggtagaaggccttagagctcagagccagagctggtcagagctgccccaaggacttttagggttaagctggacccagggcaatgtagttgtgggtccctaagcggggaggggctgagctggccgcacatgaatcttcagggtggttcccaggctgtggtgggtgggaggctgggagggatgggagcagggcaccgctagccaggaggctgtgccaggaatttggggaagatttgatagggccacaactaggggaggagaaacagggtggagaagaggctgtgacgctgagaccttctgaagcaaggagggctctgggggtgcaaagggaaccacttgctgagcacttactataaactaggtgctgtgctgactgctttgccggcaggatctcactgaactcggatgacagccccctgcagtctgatctgatgcagatgcttagacaggtttaatatgtaacttgcccccaggcacacagccaggaagccggagccttaggatccagccaggccagctgatgccagaccgtgggccccttccacactgccctccccttccccacttccgttccacagaggctgcaggggaccggagaatcaaagcaagatttgtagacagtgtgtggaacagaaatggaatccatatagggagaaggggctgggatccattttggatttgttgatattaagtgggtggtggtcactcaatgggcaccgttttccagggctggaggtgctgatttggggcccaaggctggatggggaaagctggcgacacctgcacccatcagcgaaggcctgagcccaggagtagactgagttttggaagcagaatgaccaacagccacagaggggctgccctcgggctataggaaagagaggcagagtagggcagtggttagaagtgcttggagggcagctctgacactcagcagctgtgggactttggtctctgggcctcaactgcctcaaatacaaagtgcctgacagtgcctgacacgtaccaggcatacaatagtcagtagctataatgggcactattgctactaccaacttcatggggctccatactctatccctttcgaatgggatggagggccaatgatgctttgcttgtactttgccaccactggggaataagggagtagatgtacagagcctgtccagttctccccctgctgtgagatgggggaagcagctgtctgcctgggagaagctggattgggccaggcagttcctatgtttggaagcacctcctggtgtctgctgcatccgtactggcttctggcatgactctcagagagaggctcgaggctcagctggagtgtccttggatttgggaactgacagcatgtcccaagccatggaaaggtgtgcagtgagtcacatctttcctgcccggccccagcatctggttttgtactgccggtacaagccagagcagcagaacaacttccaatcagtgagctgctcttaccacattctcatcgtggctcccttcgtcctcctctttgccaagcaggtctaatagcttctctttgatcagctgcaagaaaagcaggaaggggttggtcaggccgggaagagggtgcagaggcagaagggacctccctccattgggccccactggggtggcagctgcttgggctgtggctgaacataccgtagcacaagcccagcctggcagccagctccaggtgcctgtctgtctcaacccagccttttggctgaaatgggattttgttgcaggagatggagctaggaataggtaatggaaggccctgcttcacagggtgaactgctgtctttgtggctggcgagtgttagtaagtggtgtgtgctggtatgctggctccctgtctgtcctcaggagcagccttgggaccccctttctgtggctggggctgggggacaagattattattcacttgctaggcctgacactgcacacaattcagaagaccaggacatgcctgagttcataacattttactcctagcaatagagggtagttcttaaatctgttacctggtgtgattcaattgccataactgtgtacagttttccacaaaagtcaataaacaaagcagaataaaatctggccatgggaactgatgtggttttggggtcactgtgctgagacgcatgagattctccagaggagcctggttactggggcacgacaggtccctactgtggttccgagcagcctttggtcatgaacagccccctccgagagacagaacatggttctgcaggctcccgtctactgctcctgtttgggggacttcataggtccaggcattctttggaagttctggagccattgccattttcaggggcacacattggaggtgaagtgcattgcccatctcacagccagggggatggaggcctccaagggaacacccgtcaaaacagagcctgggatagtggcatccacaggctcgctgtcagagagagatgcaggtgagaaggctgaccccagctctgggaaccctcattgtcagagaaagctttcagaggcctcgttccagctgcctcttgagggagacatttccccagactgtcagcagccggggcggctggcgtgccctgctgtcttctcgctgaggattggtgaggactgctgggaagtgccccttccctaagactggctgggccacagaggacatgactcaggtgatgggccacctagagggcaggtgtgtgtgggtggagggagtgtgtgtgcaggtgtggacatgctcatggatgaagccaccacctccagcccagctgcaggaggggcttggagctggcctcagcacagtctggcccccttcccctcatccctccccatccttccctgccagtgtagatggcccagtgctgttccagctcccagaggataggcctgtgtttctcttacatccaccgccccccaaaaacctcccatccccttgccccacagagcctgggcttcagtgatcgactctattggtggacaggaggggaagcaggctctgcatggagagaggcaccgccttccctctactatgattctgaacctggggcacgatgagggcaccagcatgcggtcatttccctgtggggaatcccaaatcttacctcataaatataatcaaagagctctagtattgtaaggatactagcaccaatgaacaatcccatctgaccaccaatatcacctggagagagagggaaaagaccaaagctttgcttttatgcagcttccaggaagggtgaacagactgagatgcaacccagaccttctgaatggcgccccctccatggggagcctgggccttgttgtgggaggtccaggcctttggcagttccttccctcacggcacagctctgagagctaccatttttcagcattcagtggggtcggggactaagctgatggcttattggaagggcttagactagatctcatgacccacagggctaacggggttgtttggttacactcaaaaccacaccgattgggtcctgttttgactctgggctgggagtagggagaatagagagctaggatgtgtgtggactggtgacaggtgccctgggtgggagtctcgggaggagatgctcccctaacccaatcacggcatgggcttcagggccaccttagggcacctcccacccttgggataaggccataggtgtctcctctctcccccatccaaaagttagtgtgcaattttgactctttctagagctgaggttcttactctggggtttataggcccccattattcaaagttttctggatttgtcttcagatacccctgcatccaactctcctggaagaattgtaatcagtgttgctgcctggatacacctaggccaatagaatcagagcctctgcggttggggtctggatgtcgggatttttaagttcccgctgggggtaaggtgcattctcgggcccaccagagtttgagaaccactctcctgggaggacttcagatggctggagactctcctgaaattgaatgcaaaatgtatgtgtgcctgggcatttgtagcaggagagtccatagctattatcagtttttaacaggggttctgagtcctcaaaagcttaagatgctttgctgcagaggcagtgtggcagagccgagggctctgaggctctgagtccagagagtggccaccagctggttgtgtggctttcataagccctgaccttctcaggagctttgtctccaaaggatatttggtggtggtggcaggatggagggggttggatgagatgaactatgaagttctttccagccctaatctctaagactctcagtctctggaaagaggtttgggaattgggtttggggggcacagttgggggtggcaggacagttctcttggagatgccagcttgacctcttggcctgagaactctctggtaggcagatctgccccactccttctcagcttatggctgggtggggtccagcacccacatgcccgggtgaacaacagagatggtggggagaaggctcttcccagtggaacgcggtgctggcctcaaactggctctccctcattcctttcccatcaccgctccctctcatgtctttaatggaggcttcttggggactgtgttctaatggatatgtatgtcgggggaggtgtgtgatgtacgtgtgcagtgtgagtctgtagtggtatagtgtggggtatatgccagggtctggggtgtgtgcacgtatttgtataaaagcaggcaggaggtctggctgtctatggttttatgtaggtggctctccctgtctaggcaccctgagtgtgtctaagtgtgtgtgagtgtgggtctgtggaggtgagcagagtgtgtcgagcgtgtgtagtgtgggtgtgcttgtgtgtgtatatgggggtgtgtgggggctgtgtgcatggatgtgtctctagctgtgtgattggaacgtggggctgtagaggtgtgcatttgtgtgtgtggtcctggaccaccgtgggtgcatgaacctgtaggtttggtgcatgtgcgtgcagactggggtggggtatgctgtgggtagtgtgtgtagcgtgcacgtgcatggacaccaggaggtgagaaagggccgtgcggtgctgagagaagggcctgatgggacctgatggctgagggtttgcaagcggcacacgctctcatcacaggaggtccagatggcagcatgagctcctcagccggctattctggatgggaacacgatcgatgctgaacaaactcatcctcatatctgacgcagacatgacaaattcagagctcaggcccttcttgctctgtatgtctctctctctctctctctctctgtgaaagagagggatctgtgtgagagagagagagagagaaagaaagagacgcacatagagcagagagacagagaaagactgtgagcctatgctgggggagggcagggggtaggaagaggcctgtcctgggtcctctttatggaaataaagggcaaggccagcataggggtgagtgaggggtctatgtctctgctggggccaagggaatgagtctcttggctcagtacctttggccacaatgacttctgaggctgagtgacagccactttaacccagctgggaccgagctatggtggggagtccccagcctcctggagaaagtgtagaaatgcttagccagcccctggacacaccagctgagccctgggtccctggcatagtgattgtccaggtgccagaaactactatttatggaccttttctgggctagggggttatcatgtttaaccatcacaacaagctcataaagtgggttttattaaacccatcttgcagatgaagaacctgaggttcagcaaggtaaagctacttgcccatattctcatagctggtgtgagaagccaggtaggaggcacctgccccttccaaaatgctaacgtcacctggttcagctcagggagacaacagctatttctctttctggtttacaggcatcagatcctttcttgagagtgagtgggagctgagagaagggctctagagtcaagtcctttaactgtgcactctcaggggtcttgtgagttttgggttgggctgggttaggatggaaattagctgcctgtatccatcagatgccactggagccggggagctcatgcgaacttttgtggggtggcagcaggtttgtagatacctggggagagtggcccttcatttgtgtttgacaaatgactctcagtccagggggcaacacctggccttctggatgcagcaatgttgcttttggggtgaagttccatcagggccctcacctcccaggtcccacctttgaccacccacagttcagccttccctccttctctccttctgatacctctgccccctctccatggccccaggatcctgactgcaagctggggcagaagaccatgaattccaagagtgcagggttagaaaggcccagagagacctttaggctgaccgtcctcattgcatagatggggaaaatgaagccaagattggggaataaattgggcctgaaattccaccccactgctggggttctttccattctgggagaggagcagtgcaaggaaacagggagtaattattagtaaatcaaaaggttagactcctccgaggctatgtgtctgtctgcttgcctcccatccacctgtgcatcctccctccctcccaccctctatgagatgtggaaatttgtgcaatagacactgacttaccaagtaaggcagcaacttcatacgccttcttctgttcaattgtctcataattgagagcttcaaaaaatatatccagaacaaggatgttctctctgcagagagaatagtcagtaccatacatggttagagctatcagcattcacagggagcatctaatacagctttcccatggaaagatggagaaaaggaggcccaggaagtgaggcagcttgcccaaagttagagctggttagtggcagagctgcggcttcaagccaagaagcctgactcccagcccgggtctggaggcctacatcagttgcctccttttgttgcttatttctgtctccctgctttctctttgcaccctatgcaggagtcctgcctggcttccaggcctctgcgcctccaaagggcctgcctcgtcctcaacatgaaggtgagtttcattaatcttctgacaaggcttgtcttggctagggtgcctgctccagctgacctcatgggcagcccctgcccactcctgaggccccctaaattcccactggtatttataacaagctcctcctgttgggaggccctgctctggcattatcaagtcaattgccagaagtcaaagaaagtttgtagggagcaaacttacatctggctggggggtgttctggcagaagcaccgcggcttgctttgctcctttgggcaggtgtgtgagtgagacacatctcggcagtaaaagtcgttactgcctgcagactgtctgccaagcagcagggactggcatcccctacaattcctgtctcctccaatgtgcccacaattcctccagtgccccttgttctcaacccactgagcagaagctggcccaggatggggtctggggacagtgttggcaagaaggaggggctggcgaagagaggagcagattcttctttctgtgagcagggctcgcagggcagctgttcaaagtatcaccttctcttgcttggcttgccacagctgtttcctaacagttcccttcttcccatctgcctttcccccgtcttctctatcgccgcctgaaggatctttctaaaactgctaacttgattcaaattaaataaaattacagttccactccccagtcacaggctgcatttcaaatgctcgttggccacatgtggctagcagctaccccgctgggcattgcggacacagaacatttccatcatcacacagcattcgtcctattggggagcagtgggcaaaaatgcaaatttgagtctgtcactcacctctgaaagctcttcaggggatccctagtctgttaggataaagcccaccccctgcacccactcggctcagcctacaagaccctcttgctctgacatatccatgttcccctttgaagttttctcttctgccctgtgctgatggtctctgctgagcttctgcctaggacacccacttctcccatgcttccattcatttattctgttaaaacacatttttttgagtaccaactctgtgccatatgctccactagaacttggcagacaacagagaacaaaaaagatagtttcctgccctcaggggctttcagtctagtggggcagacaggtaacaaacaaggaaacacaacatgaatatgtaattacacactgtggtgttataaaggaaaacaccagaggactttgagagaaaaataacaggagagcacctcatctagatgcctgggataacctcaattttatttttatttttattttttatttgttttagagacagggtctaactacgttacccaggctgagcttgaactcctggcctgaagcaatcctcctgccttggcctcccaaagcattgggattacaggcatgagccaccatgtctggctggagatgacatttaaatggagacctgcttaaggaggaaccagttaggtggaggctgggaggaaaagaattctaggcagagggaatagaacgtgcaaggtctgcctggaaaactatacatcctttaaaaaaatctctgggccaggcgcggtggctcacacctgtaatcccagcactttaggaggccgaggtgggtggatcatgaggtcaggagatcgagaccattctggctaacacacggtgaaaccctgtctctactaaaaatacaaaaaaattagctgggcatggtggcgggcgcctgtagttccagctgctcgtgaagctgaggcaggagaatggtttgaacccaggagatggaccttgcagtgagccgagatcatgccactgcactccagcctgggcaacagggcgaggctccatctcaaaaaaaaaaaaaagaaaaaaaaattctctgaagctttccctgatgtcacctcattgcaagctgcagctaacccatcattctctccttccctatgcatccccctatgatagccaaagtcaccctatataccattcagtgtgtgcttgtctctccataagactgcaagctccttaagggcaggggctgtgtcttactcatctttgtctttgtattctgaacatggagcgcagagcgtgacacacagagggtgttcaactaatgtttgctaacttgaaccaaatgcttatctttgctttcctccttgattgcctccaatttcctccttatccagttcccccttccccctgcctaccatgcccactaaacttacgagatatatttttctgatttgttaaatttcttctcaaggtacttggctgatgtcttgctggggatcttcaccatggagagctctttgttgtagcgggttaggttgcagggtgtcctgcagagacagtaattgctgtccttttccgccaacagacctggaggggagagtgaggtggggcttagtcaggtgtgggcactgggatttctaagggtccagagtagctggattgtagcagctgagaaatgagctgggaaggggcactggtctggggaaagtgaggggcagggattgtggagagaggggaactgggcttttgctgtaggttgatcttgttttccttctgcttcttttaactgtcatgtcactctttaaaaattgttgaaatgggaccacttttgcagaggtctccaagagagtcctggtgtcctcagcttctcatggctttcttccctgctcccagcctcagtattctcatccacagagaatgatccaccatcaaagcaaatgtaggagaccattttatctgaaacccagggctctgtgctcttcctgctggggctccctcatagccagtgccccaccttctctgcctggtgggttaggatgcaggcaaagttccttcatttctttccctggaggcaactccctgcatctggaacccttcctgccctctcctctcttcttccaattagacataaagtttaaggcatcatttccctctgacaaagactttctccctgatcaaacttagccaggctcttcagaaccctgttctcaactaggccttgaccttggcccccatccatgctgggcgggcctagcccagttttagcaagaatcctgctaaagtcagtttagagagaatcccccacccttgatatctgatcaccctggcctgcctttgcagatttccccctaactttgatgttttctctgggtaattttccatctactgagtcctcgctctgcttgatggctatgaatctccagctgtcttggctgaattctcagttgagtcccatctgtttcccctgttgtgatactcttgacacctgttgcaattgccctgaataaagacttccttaccattttaactagtgtcagagtgattttttctttaacacctccctccctttttcctctagccacctcagtgtttccagctaccctgggttttgctgagtctttgcacacatcagaagtcactccctctcctctcagcctgccctccctctctagtcctcctggaggtatctggacctgaggccagcactgcctcacttagctccagcaagtgcagatgctgaacgaacttgagggcacattgtttaaaaagtctgcttgtcttgattataagccatttcctgggtccagagagaggcaagcatgcagagtgggcctagctttggggctgcagcttgtttgtgcactctccctccctcctagttttccagctggggaaccagcagaggtcttctaactggcagaccccccgcaggcccctcaggcaggaggaagaagtgtgctttgtgttttccatttgcatgcatggaatgcaaacctgactttacctctccagccctcctccacctcccctaggctcaatggagcagaagaaagatggtacttcagaatcaccttggcctccccatgtagacaccatcagagtgtgtgaggggaggtattgccaagctcctctgatgcctacctggctgcccactgtctatcctctctccacctctgtcctctcccctgcattccttagcaccctctgtttcccctgaaacccactccttctccatctccaccttccatatctctttctctccccagtcccatttccagccctcatcctcttgcaccagttcccttcccaaccttctcttcttcctcctctccatctccctctcccatccctgcagcaactccacccgaccagcccctttcttctcatcctctctccattccttcttccacttgatctttccccaaacccagatgatttccatgatctcagtctcaggcccccggcccccatgattccatctgtcccctgagtactgacctagggcaggctctgcacactccttgtgctgctcaggggtacaaaaaggggcatcccctgcaaagaagaaacaccagacagagttactcaggcaggaacattcatgtcagcaacacctcctctgctttgggcttagggaaaggggtgcctcctggcagttgaaggggcagcggcctgccagtgggcagttcgaagggagccttggatcacagtgcaccccagagctggaaggctggcttctgatctgctatgtaagcttgggcaggctgttcacctcgttgagcaggagacagtaggatctgtatggctaacttctcccatgtttctgtgtaggtccagccagctcccgtgggtgacaggtgggctcaccttgaggattgagactagggaggtggtggtaagcaccttgtaagcctggctatacatcatcttctttaacccatacaggcaccctttgaagtcagaagtactgtgtctgttttacccatgataattttgaggcttaagcatcctgccttcccaggacaccaaggctagtagtgatggaagtgggctttgaacagaggtcagtctgatccagagcctggagctcttctcagcacaaccacactgctgtatgggaacaagggttgttttgtgtttcttcattgctttgttcataattccacattagtaactgagatgtcagtattagtgtcatgggtgtgattgacacctctactgcttgcctttggctaagggttggtggggaaaacctcactggctggtggcctagtctgagcatcaggtgagtaatattccccagtactggattctccttgctgggatctctttgtagaaacccaggatcttttcttttcctttaccaagctctaaagttaaagtccaccatgtttttttccttatcattttccccaaatcctttttcggagccgaagagtcaatatgctttctcctttccaaaaacaacagattaaatgacatgtttccctgtttgctctgttttctaggaagctcagaggccattttattattattcgtatttaaaacatacaaatttattattatgttacagtttagcaggtcagaagtcagatataggtctcattggtccagaatcaaggtgttgggtgggaggccaatgttctttttgaaggctgtaggggagaattcatttcctcgcctttcccagcttccagaggtcacccccacattcactggcaacccacatgcatcgactacccacattcttccatcttcaaagtgaacaagtttgcatctccctgacccttctttcatagtcatatctccctctgaccctggctggaaaaggggggttgattttgaggactctgattagatttgggcccacctttcagcacagattatcacagaaaacaattggtaatgaaccaaatgtccagtataaggatttagttaagtaaaattgaataaagtatgatataaccatgaaataacagctactaaatataataacaacattcccggcacatagtaggtctttagtcagcatgacttttggttccctctttcaatatgctaaataacaaccactgacttttatagtttacaaaatatttttatatcctagcctaattttcaccttataacagctgctgattgtgttttaaagttcataaacgtgagaacagagaggtttagtaaccaggtcatacagtaaatgagtggaagagcctgaattagaaaccaaggccccactcatgtgtccttgctgcaacactgcgctcttcctccccagatcagctttccactctgcacttcagcctctgataagccaactgtgtgagatggccacatgcattgttagtctgacaacagaggtgtcattatgtgcacatttatttgctggccaatagacttttgcctcatttgaaggagtgctagacatttggacacaaaaagtgaaacatctggatgaaagaaacatctggatgctcaaacatgtactacacgagctgcaagaattgcaagcatccagttatctggaagctaaactctcagaggtaagaacagcagacaactggcaaacattgaacactgggatgaacattccccaaacactggatgcttctggataccaggatgctgccttggttgctggaccagaagtttccacctgccctcttaataggcaccaaataacagagtcttcccagaacatcatccttttggatcccagcgaagtgggtgaagtgtttcccattaggatgagaaatgcaaggtgggtcccaggcagatcccagggccctgtggccaccctgccctggcactgacctggcatgtgaaccatgcggcagttgcagttttccacaatgtagcgggtctcacagtcaatcctacaggcggtgatgctgtaaacaggaaaaaagtcgaggcccatctctgaggatcggcactcaccccacggtgggggcaggtatgtgagctgcaagacaggaaggagggggcggcagtcagcctcaacagactcagtaactcattcatttacttactcaatcaacaaacaattattgagcatttaaataccattaactttatagaccttcaacatctggctccaatactagttttcttaccttactttaattttttcttttttcttagagacaaagtttcactatgttgcccaggctggttttgaactcctggctcaagcgatcctcctgtctcggcctctctagtagctgggactacaggtgggcaccatcaagccccaccctaacttatcttttataatcttcccataaatgcggttctcctcagagtctcttacccccaccatgtcttcccacttccacattttgccatcttgcatctcttggaaagacccaactaaattccaccctcttggtttgagacattggaatcccagacctagacctggaggacgaaacccagaggaagattcagaatgaaatggctctaggcactatccttcttatttatagtcctgggcctggactagagagactttccaagtcatgctgtagatggcaccttttccctttggagaaaattacattcctattttcagaggtccagtgatcataaatgctctcatagcatctatggtacttgcctagtgggaagggtgaaggatgagggaactaatggttgttgagcattttctaggtgttgagtcctttatatccatttttcaagattaaagaataaaaacacaatacaatgtacaaatattaagtgcactattcaatatattctaacaaaggtgtttgcccatgtaaccagcacaccaaccaagatagaggacattttaaaacaccctagaaagttcgtttctgtccctgtccaatcagtccccaacctacctgggtaatcacggttatgaattctctcaccataggttggctttgcctgttctcaaacttcatataaatgaaagcttacactatgtgctcttttgcatctagcttctttcactcaacatagtgtctctgaggttcatctacatggttgtttgcaccaggagttctttccttttaattactgaatagttttccagcattatgtatgactacactaaaatttgcttatccactcacttgatgatgggcatttggatggtttccagtttttggtaatcatgaaaaaactcctatgaatatttatacataagtcattttgtggacatatgttttaatttctcttgagtaaatggctagcagtggaacagctggtttgtaagataggtataggcacaactttataagaaactgcccaactgttatccaaagtggttcttctattttatatttccaccagtagtgtctgagaattctcattactctacatccatgccaaatctggacttcgtccacctttttgattttagccatttttgtaggtgtatggttgcatctcatttgtatttgtggttccctgacggatgattttgagcacaattttatgtgtttgttggtcattcatatataatcttttgtgaaatgtctgagttttttgtccattaaaaattattattttttaacttttacttttgggttgtaagagttgttcatatattctggattcaagtcctttgtcagacacatgtattgtaaatattttgtccataccacctatagtctgtggcttaccttttcattttcttaatggtatctattttttaaaatcaacttcagaagatataatttatatacaataaaatgcatccattttaatgttcaatttaataaatctttagaagtgtatacacccttgtaacaactaccctaatcagatatagaacatttccatgaatccccagaatttcctatttgcagtcactgcctccctgccaaccctcaggcaacccccaatatgctttctgttgttataaactagatttgcctgtgttagtgttgtatataaatagaatcagacagtatgcattcttttgtgtttggcttctttctctcagcgtaatgtttttgagattcattcatgcttttgcacgtatcagtagttcattctcttttattgccgagttttacttcttcctttctagtctttattattatttttatttctttttcttaccttgctgtattagctagaaactccagtatcatgttggaataaaactggagagagaggatatcttccctttttccatcttaggaaggagggttcattattacaccataatatattaggaatatatttttcttagatgtgcttgtcacattgagaaagttctgtcttatttctcatttgctgagagtttttatcatcagtgatatatattttggcaaatatactttctacttctattgagatgatcacatgatttttctccttcattctattaacacagtgaatggtattgattgatctgaagaagctgaacccaacttacactcctgggataaactccacttagtcataatttattatccgccttatatgttgctctattcaatttgctaatatcttgtggaggttttttgcatctatgtttatgaggcatattgtatttaatttacttttcttataacctccttgtcaagtttgggtattgggagtgtgctgacctcataaaattagttatcaagtgtttcctctttctcaattttttgaatttgtacggacttggtaccatttctaacttaaatgtttgatagaatttgccagtgaagccatctggacctggtgattgtgtgtatgcgtgtgaagatttttaattatgaattcaactcttttaatagatacagagacattcagattttctatttttgttcttgtgctagttttggtaagttgtgttttttccccaaggaatttgttcatttcatctagatttttgaatttgtgggcataaagttgtatgtaatattcttatcattttttaatgtctgtaggatttacagttatgtcttttcatgtctgattactggtaatttgtattctatttttccttattgttaataatttctaatttcattatgttttggtcagaaaacatcctccccatggtttcatttcttaaacatttattgagatgtttttatgatactggacaagaaaaataaatcaatgttcgattttgttgaatgttccacgtgcacctgaaaagtatatgcattctgtaactgttggcgtactgttttacaaaaggcaattaggtttagttgtttaatattgttgctcggatcttctatatctttactaattttttcatctgcttactaatcagttatgagagaggagtatcaaaacatctaactatgactatggacttgtctgtttctccctttagttttctcaatttttgctttgggtatttctgaaacttattaggcatatacatatttaggattgctacatcttctggatgacttgaccctgtcatcattgtgaataatcatctcatacaatgtccttgttttgaagtttactttgcatgataacagacatggcagctttattctcctactatttatctttttccatctactattttgttttcatccttctacttttaactgtcagaatctttatatatttaaggtacatctctttttgaatgtgtttttaaggtacatctatttgagtgttgtatcttatcctgtctgacaacctctctgccttttaattggaaggtttgatctatttacacttaatgcaatttttgatatagttcggttgaagttatcatgttgttctttgtttcctatttgtaccgatttctagttctccttttgttctctctcttctgactctttttgggttaattgaatattgttttagtagttcattctgttttctccattgagtttcaatttatagctctgtattattattcttagttgttgctccaggatttacaatattcatacttaacatcacaatataccttgaattaatattatgccagttcacatataattctatttatattgcttct[131 bp omitted]tctgcaatctctgtctcctgggtttaagcaattctccagcctcagcctcctaagtagctgggactacagggatgcaccaccatgcccagctaatttttgtatttttagtagagccagactttcaccatgttggccaggcttgtctcaaactcctgacctcaaatgacctacctgcctcagcctcccaggtgctgggattagaggcatgagccactgtgactggtcacactgttaatattatttttgccttaagcagccagttgacttttaaggaagaaagaaagttacgttttatatttatccacatatataccattttcattgttcatcatgcttcttacagatctgaattttccatttgatatcatttcccatcatgctgaagaatctcttttaactttttttttttagaatgggtttacttatggcaaaatttctcagttttcatttaaatatacaatgttgggctgagcatggtggctcatgcctgtaatcccaacactttgggaggcaaggccgaaggattccttaaggtgaggagttcaagaccagcctaggcaacatagtgataccgatggcagtggctgcttacattatgccggctgcagctgtgcagctgtgtagctggggctgcacactccgtagagccagtgggaaccctgacccttctgagttaagactggagctccccatgccactgcacccacagctgcagacccaggcctcctgtagctcctgggcggggctacagccgcccaaactgcagctgtgtatctgagcctccctgtgctcttctgggagctggcaacaggcaggatctgccttcctgggggtgcagctgcaactgcggcacccacggctgcagacctgggcctctcactccagcaagcaggcaggagcaggggacaagtgggagccctgccccttccaagttggcaggtgggagctcccaggtacagctgcagctgccctcccaggtgcaggatctgggcatctctgcagcctgcaccctcagtggccccagaagggaccaccccaacccatccctgcaggctggtgggtgactcctcccactgcctggcctctctatgctcttggagcctcctctgaacttggagcagggttggggccatgaatgacagcaggaggcagattgattcctggcaggaaggggatgggtccccagtaaggccccaccttcagaccagagaaggcctgaaggctgtgggagggactgccagtcttgctcactggagttgggactcagggtgccccttccaggcccacccatgggtgcccatgcatgaatcggcacacacttcctcccctctgaggtccataaaagccctgggctcagccagagcagaacagagaatggccagaggaccaagaggtcagagagacaaggggacaggacgaccagctgcagagaggagtactctctctgctgatagcggagacgatgagatgatcagctgcagagaggtgtaccctctccactgagagctgcagagatggcctgccagcagagaggagctaccctccagggcctcctcgctgctgagagctgagcactcgatggggtgagctgcctgcagagaggagctacccacttctctgagctcttctaacactaaataaaactcctctccttctcctccttcttctttttcttcttctcccttcacttgtctgcatccttcattcttcctggatgcaggataagaactcaggcaaaggcaccgtggccacagaggtttccagccagaaaaatcggcaccctagagatcctgtaacaataccctgtctctagcaagtaaaaaatatagtcaggagtggtagtgcacccctgtagtatcagctactcatgaggctgaggtgggaggatcgcttgagcccaggagttcaaggctacagtgagctatgattgtgccactgcactccagcctgggtgacagagcatgagactcctctaaaacaaacaaacaaataaacaaacacccaaaaccaacttaaaaaacctataatgtcttagtttttttttgttatttttgaaacattttggctgtagatagaattctaggttgataagtgttttcttccagaatttcaaaggtgttattcctctgtcttctggcctccattgtttctgatgagaatcagtcatattctttttattgttccctgcaggtattatgcccccttttctccctctggctgcctttgtgcttttctctcggtctttgcttctcaggatttaaactacattatgcttaactgtggctttctttgtagttatcctgcttggggattcttgagaatcctggatctatgaaatgatgcttttgaacaaatttgaaaaaatattagccagtatttcttcaactgtttttctgccttattctgtctctcctttcagggataccacttatatgcatgttggagtacttgacactgttcacaagtcattggcgttctattcccttccattagtcttttttctctttatgtattattttaataatttttattaacctgtgctcaagtttggcattcatttattattttgtaaccaatcttctattgattccatgcaacaatttgtaaatttcagatggtgtgattttcagttctagggctttcatttttttaaaggtttccatatcttgactaaaagtttctcattatttacatctttttctgcaattatttaacatgtttatgattgttattgtaaagttgctgttttctaattctaacattggggttatatgtagatctatttctattggtggtttatttttcttttcctgttttccctcttcatgtgtctaggagtttttgattgtatactaggagagagtcatttttattagatactgaacatttcagataactatttttggtgactctgggtagattatctttctctgaatactgttgagttttgttctagtaggtggttaaattaatggtgaactactttgatttcatggagacattatttaaggctttgtttagagataggtatattttagttttgtctttagtcctggggtttagcccctggtcttgggaagcgatcttaactcctaaggaacaacacttctgggtttaatggaaagcctgagttgttcatcaagattttctaatttggtgagacttatattgtagcctatctccccatgcaatggcagcaactgaaattactgctcagctctttcaactgttgtcatccccctgggctttttagactctctccctatccacatacagttcaaagttcaacctagatttgtgtaaaaatttgagggctcctcctctgtgggttcctcttttctaggattttcccttccaattttcagcctttctggcaaccctgaatactgatttctggtttcttaacttaatgcctgctgatttgtggttgagctccatccccagtattcccttagaactttgaaatgccctcaagggagaactcaggtaaataaacctgtgctgtccagtttgtgcctggttttggtctctctccggtgctgtcaaatagtagttttaaaatattttgtccacagtttatgattgctatttccaggagagttagtctgatattagcttctccaccattactgaaaaccaaaaggctttatacttacttgaatatttgcagggctctttttttaggtagatgttcctattatcatgttattgatgaggaaactgagtttcaggaaggttaagtagcctgtgcaagatcacatagtgatcttgtgaggggcagagtcagcagatttcagatcctaaacttgtgcttgctagtgacccagtgccacaatgccccataggtcaaggaaatcgatgggagggatggagaaaccctccatggagcacttttcagacattatttatttaattagttagttttagagacagagtcttgctttatcacccaggctggagtgcagtgccatgatcatagctcactgcaaccttgaactcctggactcaagcgatcttcccgcctcagcctcccaaggagttaggactacagggatgtgccaccacagccagctaattttttgaacttttttttttggtagagatggagtgttgttagggtctcaatcctcctgcctctgcctcctaaagcactagggttacaggtgtgagtcatcatgcccagcctttcttttgtttttctctaactgccctgttcttcctttcccatgaagccttgctctactttgtcatgttcctctttcttttcagtttgtgagctaaacaggctttcacagagatttcctgtatgaccttgaataagtcactgctcccctctggaccttagtttctcatctgtaaataagaaggaattgggggctagacaccaccaagtcccattcaagtgttgatattctatgatttagaatcggagggagaagggtgggaggagggagaggagcagaaaagataactatttggtattgagcttaataactaggtgatgtaataacatgtacaacaaacccctgtgacatgtttatctatgtaacaaaccttcacatgtaccctcaaaccccaaattaaaaaaaattagccaggtgtggtagcaaaaaaaaaaaaaaaaaagaattggttggatcccctacattgctcaatattggatccatgaacacacaatctggattttggaaggactaatcatgccttttgggcagggactgggggtctaaaatgatgcaggttaactttgggggaaactcgtttctcttctactaaaatgggttcttacaatgggtggacaatgaatgtagctggtgaagctctggagatgggccaaggtttgttcagggtcagccacttccccctctttttttttttttttttttttttgcagaggtcatgattcagatacccctccagccctgctgtggctggttcatcatttgctccatcagcgtctctgaagcctcacacacaacagcagctggaaaattactgtgtgcacagcaccgactcttgcttaccaatgagtgtctgaaagtgggttggagtatttgtttatccgggtaagcaaagactcaggaggaccctgaagcaccatcttcaaatatctgaagaactgtctcagggaagaattagatttgttttctggcatcccaagggaaagatagacacaagaatagttgtaatacggaacgtgggatgataataacgtttatttttgttgcaggcactgtggtaggtaggcacattataagcattggatacattctggctcaacataaggaagaactttctaatccactggtataattcaataataaaatcactgtcttgggagtgacttctccatcaccagggctgttcaagtagaaactatacaactatttggctgggatgggaagagagagagattcaagcattgggtgtacagttagatgagatgacttccatgatctcttaagcctttgtgtctaatcatagaccttaaatctactattctaatttgagaatgagagatagcagaatgacccatgcagaacctcgaactcctctctttcatgagacagctgtgtgactttgggtaagctacacagccccatccctcagccccagcttttagtttccttatctgattaaataagttcagtgcccagatgctagtaggtacttgccaagacttagttctcatcaccttctcttaataaactccttcatgtttttctatcctttcatttattcaacaaatattctagctccaccttggctctctttacaatttggctaaacaggccagcaaatctctgcctttttggcttaagttattttgagttgagtttcttgtgataatgactcctgcccggttcagacatccaagtcaagatgttaccaggaagatgaatctatgggagtggagctgggagagagatctgggctacagacatgaatgtgggagtcattagtgtataatgaacatgtagggtggatgagctagcccggagatcgaggagagacacccaggattgagatgctcctgcatgtacttgacaactcatcctcccccactctttctccactgtgctatggaactggaggctttgataattgcttaaatttatgaacagagcaaggaatgcagaacttttgtgattaaataccctggtgcatgtctttcattgctccactgtctggagcttctctcaacagtcgccttcattttgtagagagaagctgatgtttgcccttaacctgcctggggacatccttatgttgttcttcaatcattgatttttccagcctctcccagaccaaagatcctaaggcacaccagtaggtggcgctgcagcaagcacagctgcccaaggcctccgcagccctcgcagccctaaggggagtccagccaatctcctaggaccttgccaagctccctgggcccttccctcctttgtgtctgcatcccacactctgaggctttgacttagatgctgctgtgagtggatgctgagaagatgatgaaactgcctaagagtatgtggtttctgcttctggaatgggcaggaaagcatatatgaggagagaggaaaaaggagggagacagggagagatatccacctggctcacctgatacccacctggctcttctgttatgtcagtcactaggccttctgccacagggataggacacggtgctcacagggctgttccatggtgccacagggattggacatttgctcacatggaccaaattccattaggcttgggggtatccctgagggttcctgcccaggtggaggtcaggatcctcagccttgcctggcctggcctcctccctttcctcactgacccgtgtgtctgagatcctggctcgtcttccgctgggaatgactatttaagagcctgtgctccgtggtcaagattaagctggctttgaatcttggccctgacaccaccttagctgggggacattggacaaatggttgagcctctctgacctttccttctgcatgagatcaatcctgagatattggctgcttcagaggatgctgtgatttttgaacatgttaaagtatgtgtaacccagatattacccttggctgacatttgctctctgttctgcataataggacctgacataaaatgcagccccttgttaagttgtacagaaggcccactcacccaaagcattagaacacacagaagatgtcagagggagttggaggagggggctacctcagagcaaagcaaaaccttccactggaagagaggattctactcctccttcacctgcctgatcctgctccctccccatctttttctctctttcttctccctcctcctttctctctcactcatgtgctcttacccttttccaggagcagaatcaacatgttcctaagcagtttcatcctattctgaagtcttggcacatggcaacatcctttcccacagagtctcactatatcatagtattttcccaaggaaaggaagttccctccctaagaggaattccgaggctagatgttaagatatttttctgccttgttgtgtaacaagatggaacatctccaagagtgcctgatgtatacagatggtgaataaacggcagccatggtttcactgtgagtcagtattgcccttctatctccctagttaggaggttggctcagggagtgcagtgagtgatggctggagcccacctggccatgcctttgcatcagtcatgaagagacacactccaatgacctatggttccaatgaagtctcctctctgggatctctgtctgtgtattattggctgggaagctagcatccaacagtttgaccacttcttcacaatggtgtcagcaatgcaatgtagtggctggtggtgtgagaagagcactattggggcaggaattgtaacctctcagcctaatgtatctgctccactaaatcaggggtctggaccagatagtttctaagctccagggtcttcaaagtctttgagtctacatatctcacttactgccatccaggacagatggtggtaggtggatgggctactctcagatgattagggtggtctaaatgtttaggtcagaacatgctttcttccttttctttgtctggagaaaccgatcaagacgaggccagcatgaccctggcttagagccagcagaaagccttctctctgagaaaaactgccttgggaacggaggcaaaaagtctcctttgcagtctgtttttcagacagcatagtcaaaaggagtgttcagcttgctcagcaaggctctatcattgacaagatagtgctcaacctgatggacgtgtcctttgaaagtgtgagagacaggagtgggggtgcgccctgggctgttaccttgttgggggcctcagaaaggcttttgttagcccaaccagctgagtggtccaacctaatcatataaagacttcattaattcctaggatgcgtcaggcacagggccagacactggggctatagagatgagtaaaacagggtacttgctctcaaggggcccctgtttgcctgagcccctcccgctaccatcttgaggcacatctccagagccctggagcctgttctctccctcctcctcctgcccacacagctgaggggtggtgggaagaactgatgagctgtgtggtcttggtcaagttacctaactactctgggcctcagtttccttatctgtaaaacagagataataatttgcaactcctaggacttcctgagagttaaattagacaatagacatggatgcaccttgcacagtgtttacatgcgtttgttgagtctgagtctttaggttaggaaagcacttatgaaagtccttcattcaagatggcagtatggtggctggtctctttgcctgtcctaattgccatcctcctctcagaacatccccacatctcttcttgctcactggatctcagactttgacacatagtgggtgcttgatgcttgcttgttgaatgaatgaatgagcgagcaaatgaatgaatttccctatcctactttctcccagccccagaccagaggataagtacaagagactgcctcctctaagccagaactcgggttctaaccactggaattgacaattcccctttggctagggctggcttaaatgctccttctgtgggtgtcagctgagttctgcactctgctgaaccaggctgaagccaggcaggagcagaatgtccatgctggtcctcatgggctctacaatgaggtgggcttagcaccaaatcacatctgagttcaggactagccgatggtcaggatttccagtgtgatcttgggcatgacactcaacctttctgggcctttgtgccccatctgtaaggggcactatactccgagaggccctaggttctaggatcaggtggccctgtgaggtccccctgtttctaaccttgtgccttgtcagctcccctctttttcctgcctcccactataagtgcaaatttctgtcttgccccacccagttggagggcaaatcagagcctgctttttgagccataatgttcagtttgatgtttttattgcatcctgctgcatgatttaagtgtgtttgtatatgattattattgtgctccttttaaacaatttggaaatcaaatcacatactaaaatcaaatccaccaatcagcaggtaacagaggcatcaaaggggtctcaggggagacatgtccttgtaggcagcacagaagcagtgagacaccctcctcctgcctctgcctggcttcagtaagggttcaacccagaaggtcaaagcagaaaggatgagatcaagaataagcaaaagtcactgttaagagatggagcaataacacctgccagttggtgtctgtggattaaaagggatttaagaatattatctcttttaatccccacaataaccctgtgagactgggtactacttgcccaaaagactcactgtagattaactgatggtataaatatagctgatatttgttgaacctttactatgtgccaggcactgttctaagcattttactagaaccgtctcattgaatcctcataacagccttatggaattgaaactttgattgtctctgttggatacctggtgagactggagcccagagaggttaaatgactctggtcacattggacagtaggtggcctagctgggattggaacccagcagatcatactttttgcaaccacctgagactgctttgtctaaagaaagaatataccacagcagggtggagtccacaggaagcagaggtaattactgagtgagtggctggaggccattgcagagatttttgagatagggatatgagttcttcagaccccaatatgggaaacattgcatagatgcatcaaacagcttagttctcacaacaaccttgccgattaaacattatccctgttttgttttttttttttgagacggagtctcttccatcgcccaggctggagtgcagtggtgcaatctcggctcacctcaagctccgcctcccaggttcatgccattctcctgcctcagcctcccaagcagctgggactacaggcgcctgccaccacgcccggctaatttttgtatttttagtagagacagggtttcaccgtgttagccagaatggcctcgatctcctgaccttgtgatctgccttcctcggcctcctaaagtgctgggattacaggcgtgagccaccacactcggcacatccccgttttactgatgagcaaacttcagtcacttgccacactgctaagaagtggcagaggcaggattcaaaagcaagttggtctgaccacaaggctactggctgggggtcaggggacatcctaatcttggctctgctattaaccagctctcgtctctaggagacttagcattttcatctgcagcatgtaggttcagaatagataacctgttgtgtagtacaggtggtgggtgctctataaggcaaaccaggggactgctccccattccctccaatcctgggcatatggcaaacatcaccaatcaatcacagacactgtcttagaacttatctaaacactgccatttgattgaaattggaactgagaggaaatgttccattttgggaggcttcatatgtagaaaccatcaaaccacacattgctaaatattcacagagaacagacaaaacttattatgtattatataaaatacagaatgtgctcagcatgacttccccacaagaacagtaaccacaacctgcctgcttgtgaaggagtgtccctgactggcgtttggacaatcagaccacacagggaatcaccccatcagaatctggggatgccctcctcctgccctggaatcacacacagctgattgttgtgctggttggaagcgaagttgcagtagtagctgatatagcactttgatgagcaacaaaaatcaatttaaaaagtgaactacccatggtttgtgatgaataaaataataagctcatatccattgcaaaaatgtctatgagtgggagagaatgtgataagagcagaaaatgtgaattggttatgcaaaaaagcaacaggatttttttttgaaagactataacttgactcattctaacacgacttttatcttgggccttgctggctctagatatgcctctggagctctgcgagaatcctttaagctttgatgtcataagagcctctgcagttttgtttccatctgtccatccatccacccacccacccattatctgtccatctgttcatccatctacccatccatccatccatccatccatccatccatccatccatccaaccatccatccatccatcttcccatgccccccacccatccaccttctatgtgtccaataaatattttttatttttttattttttttgagagtgagccttgctctgtcacccaggctggaatgcaatggtaagatcttggctcactgcaacctccgcctcctggcttcaagcgattctcctgcctcagcctcccaagtagctgagattacaggcacccgaaactaatttttgtatttttgtagagatggggtttcaccatgttggtcaggctggcctcaaactcctgacctcaaatgatctgtctgctttggcctcccaaaggttgggattacaggcatgagccaccacgcctggccccaataaacatttattaagcactaatctgttccagaaacactgctaggaattgaggctatgaagatgaataagatatgattcctacacccatggggtttagtctaaaagaacagacatgcacataaccaagcaaatgctatagtggggtcataatgtccaggcgtagtgggggcactgaggagggcatggtccaactaattgggggtgccatccggaaaagactttatggagggggtggtcacctttgagctgagtttagaaagactatgtttttttaggcagatcaggagtgggaaatgtgttctgggtagaggatactgcatgtgcagagatacagaggtataaagaggtataaagaggtggggaagcctcaagcaatacagcaaggctggcatgtgggtgagtgttgggctggggtacaatgcccggtgcctatggagcagccccaacactgtaccagctgagggcctgaacagttctccataattgttaatgtgaatcctacccacgcactagtaggtatcacccttgttaaatgatactgtgaatcctaggtatcactagcaggtctcgcccctgttaaatctgtgccctcccttcctctccccaacataagagccgcctcagcaagaagagtgttttcagtgtgcctgtgcatgccgacgcaccattataatcacatcttcatcgggacacaatttcttgggcgagtgctgtcagcggcgccggaagcatgttcccagcaaattgcctccgtgtatgatttgttgattgaaacagggggaggagaagtgttccagggatgcaggtggggaggtggactcacccacaggaaggagcctgggctttggagttacgcaggtgtggcttggctaatggggggctggccaggcactttacctctcagagctcagcttttcttcagcccctccagccacaggctaggatatcagctttgtcttttctgggccagggtcatggcgggggccaccatctgacctgccagtgctgttgggatcctcaagacatagtactgagagggagagtcctgactcctctgtaagctggaaaggggcaattttcattccagattgcatctctgtcctgcattttctccccacacgccttctcctcctccgtttcctctttttctttttatggttgcatttccatctttctaagaaaattcctgagtccaacttccaccctcagctgaagaatctgaagaggtcaggagaagtgacctttctctatgtgaattggactatctcagagctgccgggtacagctatgcagagcatgcactgcgcaactgcaagagggtctactcatatggactaaggtgtgaatgaagcctccagagagtgcacaggcgcagccgtgaattgtttgtttccctgtactgtggtgtcatctggggcttgactctgctccttagctagtcatccatcttcaattcccatcattctactcttccccttaacatagattacacatatgacatttacatggcaatggagacattcctggatgagtgacaagggcaggggattggggtggggtcaggagtgcgtttgttggggtataaattggcttccattcactatctcttttggaatagcggccttttatttccttgcttttttcaatgggtgtatttgaaatggaagttgggtccaggttggaatatttgcttaatgggttttcttaaagtagagcacatctcaatgcatttgctgcaattttggcttttgctctattcaaaatccactttcccccacctgagtgggaaatgaaggagtgtctcttgtcccagggtggcttttgcccaggctgggagtgtgagggagtgggtgctgggtgtgtgtgtgtggggagctgaatacaggggaagcctgcccagctctggcctctgcagcccgcctgtcctcccctccagccatgctcccccaccacaaccttagccctccatagcctcagaacagatttgttttcagctgacccagcaccaagcttcagggcttagccctgaataaaaaaggaaggggatgtctgttgagcccctgcatgggtggcaacatgtcagggtctgtgtgtgtgcagcctcagttaatcctcactgataattctcccttgagtggcagctgcagcagattgacaactccacgcccaacactccaccagggaggccgctggaggccgggcagagtcgtcagaatgagccccagtcaccttcttcctttgggacactactgcaggggcagggggcccacagggcagaaccaaccccggagcccaggctcaagagctggatgagtttcttccctgcactcgtgatgccgcatgattaaggctctgctgcatccctcagcgcctgagatggcctcgcaggaagctctgtgcacaccaagcagttgccataaaattcatcttttattgtcctcttcctggatcttttcagtgggggaatagtggatgcttacaggcataaaacatgtgtggcttttatgggattctgccagggtgaaatctgggatccaaactttatgttcttgacccccttccctctcagagttgagggtgaattccctgtcctcatccctagaaatgctgcaatccttggcatactggggcacatgtctcacatggggcggagctactttacagatccctccccccactttttgtttttttttagagacagggtctctctgtcacccaggctgtagtgcagcagcaccatcatagctcactgtaccctctgtctcctaggctcaagcaaccctcccacctcagcctctgaggtagctaggactacaggcacatgtcacccatgcctgtctaattttgttattttttgtagagacagggtctcactatgttgctcaggctggtctcgaattcctgggctcaagcaattctcccacctcagcctcccaaagtgctgggattacaggcatgagccactatgcctggccttactttacagcaagtaaagtactttcatttccactaaatgatttcagttgtatatggctgaggctttcttttccactaaatgatttcagttgtatatgattgagccagtgctctagccagcattggttttaaagtctctggggtacatcatgaaaactttgaatgggaattgggcagatgctgcccttcctagatgtaatcttgaatgctttgacaattaggaaggactgcgatggaaagataaatataccatctacctcaggagttcaaagtcatttttatttgtgatggactgaattgtctgtctctcctccccaaaattcatatattgaagcccttacccccagtgtgacaatttttggagacagatcctttaaggaggtaattaaggttaagcaagatgataaggttggagtccctggtgtctgttgaagaggaagacatagcagagctctttctctctccacgtgagcactgaggaaaggccatttgaggacacagcaagaaggtggctgtttgcaagcctggaagagagtcctcaccagaaactaactctggcaccctgatctcagactttcagcctccagaaataagagaaggtaagtgtctgttttttaaggcactcaacctgtggcattttgctatggcacctcgagctgactaagaatctctcatctctctcatggacaggcacacttcagtttgtgaaccagtaaagccccatagcttcttgatcactgctcactagggcctctcgtctctgaggatcatgccttaggaaactggggatggccagcgagctcacacttgaacgtatctctcaagatcaacctacagctaggaagaattttgatagtaaaatccaggtaaggggcttaatttctggatgggccttgtatgtcctaatgcatgttatggttattactctcattttccagaagaggaaattcagtcaagagagaccacgtcatctgctacagattacacaggtggtgcagttgagtccttgaaatctgctccaggtctggagccctgggccttaaaaacctgactagtttccctagcactccctggatgggagttctccctgggtcctgtgggcccatcccagggcctggagttccaggttgggtttggatctttgtccctggtacgggggtctccctgtctgcctggactttggggtgtggctgcagagagtggattccctgtcaatttcacctgatagagagggtctggtcctacgtattattttcttccaggtttccctgacctccttgctggtccccaagaaggacatgcactcttaccttttcatcaggggctcaaccaagtgacatcagtgtccacacaggatgccatgtgggcttccagaagagatcatttggggatcacagaggcaggaaggggcagatggtgtaccatgttgtgaaaagagcgtggactttggtattaggcaggtctggattctaattctcagctgtccctttgtctgtagaagggagacagcagtacggccccacagatttgctgttcagactgaatggaatgtcctaggagagtgtcggcacaatggaacacagtgacttctttgtcaatatttgggagtagcatggtgtggctaaaagacttagctgtgtgccaaaggtagacagtttggggctggctgtctcatttattggcccagtttccctgtctataagctgggaataacagctcatatctcactgtttgagaatttctatgtttcatcattttaagatgcataattttctatatcctaacatgtctataacatcttaccattaatggcctcttagcattgtgtttagtttaattagtagtgtttttctttcctactgtcacatgaaataatattgacccttacagttggagttgttaccttagatttgatgagatacacagcaaatggactcatgattgcaaacggctcagtacagtgcctggaacacagctggtgctcagtcaatggcagctgttgttattattgcctgtagaccatgggtaagttttacaaatgctgttgagcctcggtttcctcatctgtataatgggaatacttagctttacattacagggttacagggagttttaaatgagattaacatatagactgaagcatctaccgcagcattttgcataaaacaggcgctccaaagtgtgctcctcttccccaggactgcaccaagagaaatcccccatgcccctcaccattttggaattatggcaaggtgggtgggacagggaagggaggaaggggaaagagactcctcatgcctgtgctcttttgtgccactggactatctgtctcctgctcactgttgcctcctagtggtcccaaggatcagggcaaggctttttgaaccagatgggaatgttaggaaagaaaatgctatcgggtaagcctgctcagcctgaggaagacctcaacggaagacctgagccccacctcaggaacttcaactgagacgatgtaacctgctgagccttctgctgaggttttctttatacctgaacgtggccgctgggaaattttttcagatctcagatctaaactgagaggccattcctcagctcccactcgcctctcaaaacacacctctatgctggagacgtagtaacagagggcaagtttggttgacaaaacgtattggcggcatcccttctcttgtatgctcaagagaccatggtctggattgggatcagtcagcctcagtatcaaatcctggctctggatgaccatggcctgtgacatcctctctataggcctcagtgtctttattgcatgtatagggtctgccatatagtctgtgctcaaaaatattaggttgcctatcccacttccctcttccctaactcaggggcattggaaagagcactggaagaaatcgtaagcaatattgactttaactacaaaatgctcagatgtctttcctgctgctctgatgaagtggtctttgaagtgaaacatcccctgcaagtctgtaacatcatagatgagcagatgcaaactgttagaccatgaggaaatcccgggtgctcacttttcaaagaggaacaaataaccttcattcaagcctggctacttgagattgttccatggaccatggccctcctgcttggtggtggggagactggcatgtggaaacaccatgagaaagtgtgggagggtaggggtgcagggaaggttggactgacaccctctggtcctggtgctttgcatagattaggtatgaggtaggtactattgttatccctgctatgcagatgaagaaattaagatggagacatgaagaaacttgctcatggtctcattgttggctagtcatggagtcagaatttagatttcaacagtctaatgttgaagccctgcactactatcctatagtcccataccaaggtacccctccttgtctaataccagatggtgcccattgcccctggatagaccttcttttcagagacccattgagagatttctgtatgtctcaggatgctttgccaagggtctctttccctttcagtggaggacaggcatatcatcaccattttacagattgaagacagactcgcaaaggcaaagtgattttctagaaataatttagcaggtcagaggtacagtttgaatgagaacccaagtcttttgaatcctggtcctaccgcacactgaaccagctgtctcccaatcctgtgccctgcccagctctctttctgggttactgtgtgaggaagaatatgatcccatacactgcaagctagacccctgaattgactatcacaatattcacagccctgtgaattcaagttttgtcatttcctggaagctttacaaaatattaataagctgatttactccctggcatcttcttgagactcctgtaggcaagcacctcatctggggactgagttgaggttggagtcagatgtcctaagcttgaaattcatccttgccacctgctagcttggtgacctcgggcaagttagtgaacttctttgagtatcagttacctctgtgtgaaataggaataccattcttcatcttggaggggttttatgagatataagaacagaatctagcgcactgcctatatgacatatagaaggcagtcaatatagcagagatcctcattggcaaaagaggacagaaaaattttgtctgccttaagaaaatccagtctgtgaaattcacccaaccttgggtcagggcagacattatttcaattattcaaggatccatgattttcacaaagggtttatccagggccctttaagtggcagctacatgtgcaagctgccatgcctgtttacgaatcattagctacttgacggtgatggtagcgggaagagaaaaagagcaaagcccacattatggaaagccagtgctgggagccactgactgctagaaaccaaatgggactgcagaaaaaataggtctgaaagaggaacccatggaaaagatttcatttataaatacgtatctcacccttgttctcagaaacccatccttcagttgttgaaagcaagatatgaacacacagagtcaggcaccgccaaatgctttcccctaaactttaaaagctcagtgacaggtgactggaatgagccttcacaatgtaagatgccaattacaaaattgttaattcttctggctgtaatttatcctgctatccctttgggtagctaaacagctttgatcatgagttgcccaatcagcttataagtcttcttgatgaatcactgtcattctccccgtcctttctctgggctgcagtaattcttgacaactgccttagagcctctgtctcctgtcgatgcgagagggaagagccatctattaggaggagcatgtggagaacaggaagctcctggcattgaggagcttggcaggtggaggataaaactctctcttcaggatagatagggcagaggacaggatgatggatacagcctctacccagtgacctccagggtatgaggtccctgcttgttggggtctttgggtcgggggtggctaggcaaatcgtgcccactgagctctagcgggtatccagaacatcttcagtaagaaaatgccatgtgctaacagtgagttcactgcacagataaactagggcagttctccagtattggaattctcaccttcttcctaggctgactgcttttcccagctctccttgaatctaggagaggcacgtgactagttctcaccattgagatgcggtaaaatagaagtgatgtgggatcccctgactgagtagatgtgctctctcttttaccagttgatagctaaagagagatgagcctgaaaacctacaggaggacagagacaccagttgagagaaggctgggtccctgaatggcagcatggagaaccgcccaaatgccaactgcattggattgcaatgtgagtgagaaacacattcttattgtattagtgttaaaccactcagatttaagggttgattgtcacaacagttagcctcccctgcctaatacaggcaattttttattagttttattagtaaacaatactttatttaacagaactcaaattatccaactcaagaaaatcccaggcggccgtctgttctgagttagcatgatggcttctattaactacatagcacattgcaattcacctctgatatctgttgtatgggaatttagcttataacttgaagagcactaactgcatggattcttaatttttagacctgaaaaattattctttttgggagttggagggaagaacacagtctcttttaaaaaggaccttggccccttttccttctcccttagcctccactggaggtgtgaaaaggacctacagattccattttcccaagtcaatgtaagcatcccttcttctctaagttgaggctaatcatttctctccaggactgttgcaagagcttcttaactggcctttgtctcgtgtataccctcctccaatctgacccccacctgatcttactaaaatgcagactcaattatatcatcatcctctctggtaaaatccaaaatccttttcttcagaagaccctctctgatgggccttcctacctccagtctcatcttcctgcaaaccatcaggctcttgtagccactctgcctttactcttttttttcctttataagaggaagctttattgttaattatttaccttaatagtttcacaaaaagggacatattaattcagttcaacatgactggcagttagcaaaatctagtgaagcaagcgtttctgattgctaaggatttaatctggatgcttttaatacttagccatctaacacttcaaacataatccagaataaatgcatcatctccttccctttcaccacaatgccgcacctacctttgctctcctgtatccctgccaggattgttctttctgcttgtcagcctgcaaccatctacccagctttcaaggctcagtttgtgcccttctgccaagatgccttctccacccattccctctgcttttggatcttggtgttcagcctgagttttatcccagcacctgcaacaccacattgtatttattgcctgacatgcccatctcctgccagcctttaagctttttggggaggtaggtaggtgactgattactctttcccagggctggcccaaatctggggctcaaatgactagacttctggactctgtcgctgccaaaccagttaccaaggtagctttccctccctgggcctcagtttccccataggtaaaattgggagcttgcttagcaagtgatagtccttgatggcctgcctctaagggcttttccggtttcagcatcccaggattctatgattttaccactaacattgtgcagtcatgtgagggaaatcaatactcagagtttttcctgtgtgtgagccacaattcttcagaagactgtccttgggggtgcatgtggctctcagctttgcctgacaccagagagaatttatcattagagaaaagcttatggtgcaggtttagcaaatgtggcgtctcgggcgttccagcacttcatttatcaagtaaacacagcttcgttatttagacttcagtcacttggctcataaaccatcactcagatataaaaactggggtaagatgtcctatttattgaccctgatgagaaatgggtgtgatcaattatgccacggcatgggaagaaaagccttttgcaggcttgcaacttgttacacggttgcttttattttagggcgtgatgtagggcgggcagggggaattctcaacacatttcatgccacgccattagcaggttcaaggagctccatcaccattggccacatggccttgggtcagttccctcccctccactcagcccatgtcagctcctgggtcacagctctcctacatgcatttcccagggttgacattggggtggtttacccctttcccagcactccaggaatacaatgcaggacagtctgttgtatctaatggagttacattcataggttttacaagctcaaaacagtgagaattcatggttgttatgattcgggcaacccctccttgccaaatgcctggcctgggatatgtccgatttggccctgatggctgcatgtgcaggaattccttgggtgtcccccactcagtgctggccacccaactcactctgactccagggaagcccttcacctcttagctcagttgccaccttttcctctcctgctccaggactcctcgttcctcaactgtcgcttctggttaccaagggcctctggggtcagccagccttccgagaacttcctgctcccccgtctgcttcacattcctatgttatggctgaattttctgatgagcctctcatgccctgcctcttcccgaaagcttttctgactcgtccttccgcttgtcctgctctgtcagtcaggctggagtgtagtggcatgatcatagctcactgtaagctcaaactccagggcttaagcgatctttcctttggcagtgtatttctactaagaaacctcaagtccagggcttggtgtctgatttttatattcaggacgccctttctttttttaattcaggaaattcgcaagttaaattgaatcccagatggcactgtttgagcctttctgcccttggcctctcttcacgggaatcataagaaaagcgactgcgccatgttctctcggtcttgtctcctccgtgataaatggtggaattaattgaatagcagagctggatcacccagggcagtggttgtcaaccgcactctgcgtcagaatcacctgggaatacttttataaatcacagaagccctggactcagccctaagattagaattcagttgtttctggcatggactccaagtactagtatttttcgaaaactccctagaggattctcatgctggagctaggttgagaaccgttcatctagtccaacctatttgacagaagggaaaactgagatccagaaaggccaagtgatttgcctctggtcatgcagttggctgcagaggtggggctaggcttcagttttctggggtatctttggattcctcattcaaagacccaatcagcccactccactgagattttgctgtagccacaggtggacacaccaacacacccaaagatacacagctgagtgtatgaaattcactctgtattggaaaatccaggcagaaattaacaatagaacttggaaatgaatcgaagtgaaagtgtccaagttaaaaatggacatgcttaatgttgtttgcttgaccataacccctgacagtttggggttgggggaagatagccccttcccagccacccccctccctggcccagtaggattcagccttctttagggaatagacacaggttgagccatgttgggactctctgtgaaccttttccaagctccttataccctgctgtcagagagcctgacatccccactgtaatgtgctgggtgttcagggctggtagcctaggacgctctataaagtttactggccagcgaatgaatgactcaccaggaatcgatacagttcccatctgggattgctcttagaaagaaattaatgagcagaataggctattaaattatgtaggaatgtaataccccattgaactggtgtcttcaagccagtgagctgctgtcatcagaaggagctgagcacgttttcagctcttctccagccacccagggtttccttctgaagccagagaggggttcacatatgctgtcacttgcattatctctcaaagctactgaccatctgttgagaagcccaggccacattgtactttggtctctctagattttgaacttgcctatttatttacttccacaacatcaacaggcccagtgtgaatggtgtgtgtatgtatgtgtgtgagtgtgtgtgtttaaggaggtgggaagggaatggaagccacagcagagatgagctaaattagggctgtctgctgtaatattagggccctgggcactgaatggcaagaggatctgcattacagggaggcttgttagaaatgcagattcctgggcctcaccttgagagagtcccatgcagttggtgtggggtgaggtccaggaatgcatttaacctgcttcccggctgcctctaacacacactggagttggagtacttcattctatacttcaaattctatactagcttaggaaaacttcattctatacttcaaatattattgtggtaaggagcagtgtgaaatcaccccctctgaacctccatacctgagctataaatcaaggggaaggacttgatgatctttaggtctcttctgtctctatgtgcttgtcattttcctaactgtccagggaggtggacctgaacatgatggctggaagccaatgcaagagttttaagatgctggataacatctttgcagggctggctttgttgtgacgactgactaccaaaccccagagtcttccaaggtttttctgggcagaggaactgccctttctggaacaaccctccagagaatggaggaaagaacatttctaagcagaagcccagtgattctgggttgaaccgcctggaaaccccgtggaatggttctggttgaggctttgcctccagggctgacctccagggcaggaagttctggggaggagctatggctgagatcctcagtggttaagtcagcccagtcacatagaacagtcatagagtcataggccagcccaactccagaggccatcagagtcagcacacttctactggcattagaggtggggcatttggaagggcacagaggactgaggctgaacctgcacagattctggatgaagttgggtgtgcctccctttacaaattcgagtttcccagtaaaagttaagcatacatctttttaatacattgatgaaagtctattttcagggaactacatattaaaaaaaaaggtatgtatgccagatgccctctgtatagccatgaaagtccctgtaccatggaatggcaattaacgaggaaattaattttgaccaggagataatataagtgattgaacttttacagagtattttcatatacacaagcttatttatcctgataataacccctgggaggtaggtaaggcaggctggtaaaccgaggcacagctgttcaatgacagacctgaagttggaacttgggcctcctttgtcaatgctcagaggtgaggccgactggaaaaggatgggagatttgtttggtaagagtagatttccacggattgttattttttagcaagccaactcttagagtgattgaaaatacctttacttcattaatctacatgcaattttctaccactgttttttctcccttctgagaagtcaaaaaaaaaaaaaaaaaaaaacaaaacccaaaacaacaacaaaaaacaccaaacatctttttgcttcttatcacttcactttgacggagctcagctcataatacaattctactgctggcaggccctggtttttcttgtctatgactgtcagctgtccagtaaccatctatcttcctttcggcccctactctctcttctcttttttacatgaaaatctttgggaaaatacatttggcaatattttttttcaagagacttgcaaatgctcattacccctgatgcagtcatctcacctttccagaaaccagcgtaaggaaagaattaaaattagcctaataaaataatctcaaagctctatgtacaaagatgttcagcagaatattatttataatagcaaaaacagataaagcaattcaagtgttcaacaatagagagatgataagtaaattatatgtctgtttgatggaaatattatgcaatcgttaaaatgatggatatggagagtacgttggatcaaggaaatgacacttccaacataatgttgaacagagaggagcagcacctgcttatactgtatggttatggctctaaaaaaaccaaaaaccaaaaaccaaacccacaaaactatatgcggaaaaagataactgaaaaactgttttgaagtattaaactcaggatgtctttatatatatatatattttattatactttaggttctagggtacatgtgcacaacgtgcaggtttgttacatatgtatacatgtgccatgttggtgtgctgcacccattaactcgtcatttacattaggtatctctcctaatgctatccctccccactcccccaaccccacaacaggccccagtgtgtgatgttccccttcctgtgtccaagtgttctcattattcaattcccacctatgagtgagaacatgtggtgtttggtttttttgtccttgcaatagtttcctgagaatgatggtttccagcttcatccatgtccccacaaaagacatgaactcatccttttttatggctgcatggtattccatggtgtatatatgccacattttcttaatccagtctatcattgatggacatttggaatggttccaagtctttgctattgtgagtagtgccacaataaacatacgtgtgcatgtgtctttatagcagcatgatttatagtcctttgggtatatacccagtaatgggatggctgggtcaaatggtatttctagttctagatccctgaggaatcaccacactgtcttccacaatggttgaactagtttacagtcccatcaacagtgtaaaagtgttcctatttctccacatcctctccagcacctgttgtttcctgactttttaatgatcaccattctaactggtgtgagatgatatctcgttgtggttttgatttgcatttctctaatggccagtgatgatgagcattttttcatgtgtctgttggcagcatcaatgtcttcttctgagaagtgtctgttcatatcctttgcccactttttgatggggttgtttgttttttttcttgtaaatttgtttgagttctttatagattttggatattagccttttgtcagatgagtagattgcaaaaattttttcccattctgtaggttgcctgttcactctgatggtagtttcttttgctgtgcagaagctctgtagtttaattagatcccacttgtcaattttggcttttgtagccattgcttttggtgttttagacatgacgtccttgcccatgcctatgtcctgaatggtattgcctaggttttcttctagggtttttatggttttaggtctaacatttaagtctttaatccatcttgaattaatttttgtataaggtgtaaggaagggatccagtttcagctttctacgtatggctagccagttttcccagcaccgtttgttgaatagggaatcctttccccattttttgtttttgtaaggtttgtcaaagatgaaatagtgtagatgtgtggtattatttctgagggctctgttctgttccgttggtctatatctctgttttggtacaagtaccatgctgttttggttactgtagccttgtagtatagtttgcagttgggtagcatgatgccttcagctttgttcttttggtttaggattgacttggaaatgcgggctcttttttggttccatatgaactttaaagtagttttttccaattctgtgaagaaagtcattggtagcttgatgggggtgccattgaatctataaattaccttgggcagtatggccattttcacgatattgattcttcctatccatgagcatggaatgttcttccatttgtttttgtcctcttttatttcattgagcagtggtttgtagttctccttgaaaaggtccttctcatcccttgtaagttggattcctaggtattttattgtctttgaagcaactgtgaatgggagttcattcatgatttggctctctgtttgtctgttattggtgtataagaatgcttgtaatttttgcatattgattttgtatcctgagactttgctgaagttgcttatcagcttaaggagattttgggctgagacgatggggttttctagatatacaatcatgtcatctgcaaacagggacaatttgacttcctcttttcctaattgaataccctttatttctttatcttgcctgattgccctggccagaacttccaacactatgttgaataggagtggtgagagagggcactcctgtcttgtgccaattttcaaagggaatgcttccagtttttgcccattcagtatgatattggctgtgggtttgtcatagatagctcttattatttttagatatgttgcatcaatacctaatttattgagagtttttggcatgaagggctgttgaattttgtcaaaggcctttcctgcatctattgagataatcatgtggtttttgtctttggttctgtttatatgctggattacgtttattgatttgcgtatgttgaaccagccttgcatcccagggatgaagacaacttgatcatggtggataagctttttgatgtgctgctggatttggtttgccagtattttactgaggatttttgcatcgatgttcatcagggatattggtctaaaattctctttttttgttgtgtctctgccaggctttggtatcaggatgatgctggcctcataaaacgagttagggaggattccctctttttctattgattggaatagtttcggaaggaatggtaccagctcctccttgtactctggtagattttggctgtgaatccatctggtcttggactttttttggttggtaagctattaattattgcctcaatttcagagcctgttattggtctattcagagattcaacttcttcctggtttagtctcagaagggtgtatgtgtcaaggaatttatccatttcttctagattttctagtttatttgcgtagaggtgtttataatattctctgatggtagtttgtatttctgtgggatcggtggtgatatcccctttatcattttttattgcgtctatttgattcttctctcttttcttctttattagtcttgctagcagtctaccagttttgttgatcttttcaaaaaaccagctcctggattcactgattttttgaagggttttttgtgtctctatctccttcagttctgctctgatcttggttgtttcttgccttctgctagcttttgaatgtgtttgctcttgcttctctagttcttttaattgtgatgttagggtgtcaattttagatctttcctgctttctcttgtgggcatttagtgctataaatttccctctacacactgctttaaatgtgtcccagagattctggtatgttgtgtctttgttcttgttggtttcaaagaacatctttatttctgccttcatttcgttatgtacacagtagtcattcaggagcagcttgttcagtttccaggtagttgagcggttttgagtgagtttcttaatcctgagttctagtctgattgcactgtggtctgagagacagtttgttataatttctgttcttttacacttgctgaggagtgctttacttccaactatgtggtcaattttggaagaggtgtggtggggtgctgagaagaatgtatattctgttgatttggggtggagagttctgtagatgtctattaggtctgcttggtgcagagctgaattcaattcctggatatccttgttaactttctgtctcgttgatgtgtctaatgtggacagtggggtgttaaagtctcccattattattgtatgggagtctaagtctctttgtaggtctctaaggacttgctttatgaatctgggtgctcctgtattgggtgcatatatatttaggacagttaactcttcttgttgaattgatccctttaccattatgtaatggccttctttgtctcttttgatctttgttggtttaaagtctgttttatcagtgactaggattgcaacccctgcctttttttgttttcgatttgcttggcagatctttctccatccctttattttgagcccatatgtgtccctcacgtgagatgggtttcctgaatacagcacactgatgggtcttgactcgttatccaatttgccagtctgtgtcttttaattggagcatttagcacatttacatttaaggttaatattgttatgtgtgaatttgatcctgtcattatgatgttagctgcttattttgctcattagttgatgcagtttcttcctagcatcgatggtctttacaatttgtcatgtttttgcagtggctggtaccagctgttcctttccatgtttagtgcttccttcaggagctcttgtagggcaggcctggcggtgacaaaatctctcagcatttgcttgtctgtaaagtattttatttctccttcacttatgaagcttagtttggctggatatgaaattatgggttgaaaattctttcctttaagaatgttgaatattggccccccctctcttctggcttgtagagtttctgctgagagatcagctgttagtctgatgggcttccctttgtgggtaacccaacctttctctctggctgcccttaacattttttccttcatttcaactttggtgagtctgacaattatgtgtcttggagttgctcttctcaaggagtatctttgtggcattctctgtatttcctgaatttgaatgttggcctgccttgctaggttggggaatatcctggataatatcctgcagagtgttttccaatttggttccattctccccgtcactttcaggtacaccaatcagacgtagatttggtcttttcacatagtcccatatttcttggaggctttgttcgtttctttttattcttttttctctaaacttctcttctcgcttcatttcattcattcgatcttcaatcattgataccttttcttccagttgatcgaatcggttactgaagcttgtgcatttgtcacgtagttctcgtgccatggttttcagctccatcaggtcctttaaggacttctctgcattggttattctagttagccagttgtctagtcttttttcaaggtttttaacttctttgcgatgggttcacacttcctcctttagctcggagaagtttgatcgtctgaagccttcttctctcagctcgtcaaagtcattctccatcgagctttgttccgttgatggtgaggagctgcgttcctttggaggaggagaggcgctctgatttttagaattttcagtttttctgctctgttttttccccatctttgtggttttatctacctttggtgtttgatgatggtgacgtacagatggggttttggtgtggctgtcctttctgtttgttagttttccttctaactgtcagaaccctcagctgcaggtctgttggagttttctggaggtccactccagaccctgtttgcctgggtaatcttcaatacctgtttgcctgggtttgtgggttcagcagcggaggctgcagaacagcgaatattgctgaacagcaaatgttgctgtctgatcattcctctggatgtttcatctcagaggggtacctggccgtgtgaggtgtcagtctgcccctactggggggtgcatcccagttaggctactcgggggtcagggacccacttgaggaggcagtctgtctgttctcagatctcaaactccgtgctgggagaaccactactctcttcaaagctcagttggaaacgcagaaatcacccatcttctgcgtcactcacgctgggagctttagactggagttgttcctattcggccatcttggaacccccaattcaaactcagtatgtcttttggtggtccacattttattctttctacttttctgtgttttccaagtttacagtcatgcacatgcagagcttctgaaatggaaagatgatatgtcctttgcacagtactgtggggaatgattgagaacatggagttacagagaggcttgggcttgaattagagcccagtcacgtagaaggtttgtggcttggggaaggtcattaaattctcttattgtcaggttccccagctgggaaatggggacatatcacacttaataggcaggttttttttttgagagtgtgtttaatttactgaaattaatggcacataataggggctctgtatttattgaaaatgattgaacatatatattttttgagacaaagtcttggtttgtcacccaggctggagtgcagtggcacagtcatagctaactgtggcctcgaactcctgggcacaagtgatcatcccatctcagccccctgagtagctgggactacagctgctcagtcaccacttcctgctatttttttttttttgagaattggggtctcactatgatgcccaggcagtcctcagaatcctgagctcaagcagttttcccacctcagcctctcaaatagctaggactacaggtgcacaccaccacatctggctaatttttattttttattttgttgtagagttgggggtcttgctttgtcgcccaggctggcctcaaactcctggcctgaagccatcctcctgccttggcctcccaaatgattgaattcttattagtcaaataatatctggaggaggataggggaggcaacttccattctcaacttccactcactcatctagtgtgtatttgttaagtgtctaccatgtgcaagaagtagaggtaagggaatgtgtcattaacattagcctcatgagacataacaaactgagggagaaaaatcaggctatgtaattgacagaataaaaagtggagtaaaatgaaaaactatatgtccgatttttaaagtttttattcatttatccttcataggagccctttgaaattggaatgattttcaatccactttgacggatgaggcccgaaaagtcaaggcctttgtatgagatcctacagtgataaaggtagggctgggcttctgtctcagaccagtgggatgttaaggcgacacatcaagccccctcccaacctacaacagaaaggctctctttgaccatgtgcttcccaccatggcgggacacctgggccccatttcctatcaggatttcctctcggggagtatgaacccatctccagcgagtcctttccccgtggcagctgatgtctttttatttgggggaaggcaagggcttcattgctcaggggcagtgaagaacttccagaattggggacttggtagtgagggctgagagagaacaacttggaacacatctgggtgaagacttttaaaaactgtgatacctgggagaagaatggctgtctctgataatgaacacaaactctggcgtgcatggtgtgtggattctcaccctgctagcagttggcgaggtcctggaccccatgacccatctaatacttattcagcagatgtttagtagagctttggaggccacccagcctggtgctaggcttaggctggagggtaaaggatgtcctcatgggccatttaaagagacaagacacgtacatattgaagattttcggctaaaaactcagcgtcatggaaccaggatcaggaaaggggaaacttggcagggccctccctttccatcagatccagtgccttcactttacagatggacaatttgaagacctatagaggaaaagtgactttaccaaggccacacaaccatgttaatccactgttggttcaggataaagtaaatcagggcaggcttttggaggtgagctacctgctatacctggaaaccacggcttagagctttgaagcaaaataattcattcaacaaacatttcctagatgcttcctggggccaggtcctctgttggactctggggatataaaggtgaggaaaatgaaggattccctcaaggtgccccagaatactcaggggacagagatacaaaaatatgggtgattacagggcagtaagtagtactcttggcaacaggcaggagcctggggagtctggaaggtaaacctgggattgtaaaatgatggatgagttagttaccaagcaggcctgaaggaagggcatcactggcagtgggaacatcgcaggcaaaagaccagaatctttggcgagcatggctctccggggcactgacaagacaattctaatggccaaaatagagttcttgcagataaataatggggccaactcatgaaatggccaagcctaggcaagggttgaaagatggggattctactttcaaggaaggattggaatctgagtcaagagacatctgtggattaataactcgtgtaccaagggccacagacaaagttgattcagaggaaaagacctctgtgggcatctgagaaggcttcctggaggaggtggcatggaaggaagtgttggatttgtatatgagtagctagaggagatggtagcatggaagaaagtgttggatttgtatatgaggagctagaggagatggaattctgagaaagataaaagggcaggcaaggttcagagatgggaatctgcagggcacactgagtagctctttttgacagagcatcacaacaagtatgaaactggatcacaggaggccttgaactttggcttcaagaaaccacactttattctttagagtgcagttcaaccacttcagtagggagccaccaagggtgtctaagtgagggtggagcaggtttagggatgcctgtaaagtctgactttccagaatgtctcaattgcctgaaatataactgaactctcatcagggtagagagaaacagcaactttgcaaagttaaaaaagaagagaagtgaatcctcatggctaatgagaggatggaggtgggccaggacgaggcgaattgttccttcaaagccactttgccttggctgttgggaatgacttctttaatgcatcatcaaccttttctgagtagtccacaacccctgcagagcagcctgggcccaaagcaaggggaggattaactaaatgtatttgctgcatggggctctggagagagagggctccgggcaagaccttgtctctgacctgggagagccagtaccgagaggaggtcaaataaagatgcttgcccactcagacaacccagagagtgcaacggcaggggaaaacctggtaagtgagatccctttgtgggcttctaggtgactggacctgggggggtggaagggtggaattatcagagggatgcaggcctaggttgaccaataatttcagttttagaattgaaagtctcacttccccaaagaccctcagtcatgagcaagccaggatggttggtcactgtagaggcaacacccagaggcaatagaaaataagtgattgtgcctgaggtcaggagttcgagatcatcctgaccaacatggagaaaccccgtttctactaaaaatacaaaattagctgggcatggtggtgcatgcctgtaatctcagctactcaggaggctgaggcaggagaattgcttgaacctgggaggcagaggttgcagtaagaaagctgagactgtgctattgcctgggcaacaagagcgaaactccatctcaaaacaaaacaaaacaaaacaaaacaaaacaaaacaaacccaaaataagtgattgtgaatttaagcagttgcaactcagtgccaagccctaaattggtaaatatattggcatacaattatttacagttttcttatatcaccctttgtacacatggagtctgtgctgtgttgcctctctcacttttaatgataacttgtgctttttctttttctgatcattctggttagaggtttatcaattttattaatatcaaaaaaaatcttttggcctccttgtttttctctattgtttttctatttcattgatttcggctgcaatcatcatcattttccttgccatgcttagtgttggctcaatttgctcttctttttttttagttttttaatgcagaagctgaggtcatgatttaagacttttcttcttttcctaatataggtatttaattctgtaaatttacctgttggtattgtgctactggcagcacataaatttttatatgataggttttcattttaacctcttcaaaattctttttaatttcacttttgatttcttctttcatccatggattatttagaagtgtgttattttgcttctgaatatttggagattttccagctatctttctgttattgttttaacttaatttcattatgatcacaggacatactttctatgacttgaatccttttgaatgtattgaggcttgttttatggcccagaatatggtctatcttggtaagcgtgctgtgtgtactcgtaaagaatgtgtattttgctattgttctgtggagtgctgtataagccatcattgggtcaacttggttgagagtgttgttcaaatcttctatatccttgctggttttctgtctacttgtcctatcaattattgagagaggggttttgaagtctccaggcataattgtggatttgttgatttttttttgcagttctatcagtttttgctttctgtattttgaaactctgctattaggtgcataaatatttaggtttgctctgtcctcttggtgacttgacctttttatgattatgaaatgaccttctttgtccctggtgatattatttgttctgaatcatattttgtctgatattagcatagccatttcaactttgtttttgatcagtgtaagtatggtatatatgtttccatcctttaaaaaaaactatttttacctttatatttaaaatacattttttctgggtaaccagcatatagttgaaactttctttttttaatccagtttggcaattccttaaattgttgtggttaaaccatttgcattaaatgtgattattgatgtgttagatttaagcctattattttgttatatgtgttctactagtcccatttttttctcttttctcccttccctcattttctgcctccaactgcagtaaatgaagataaaatattttggactaaaattggacatttttgtgatttcatttataccctttgttggattataagctaaaacttttcagtttgctcttttagtggctgttgtagagtttatatataaatctttaagtcatcatagtctaccttcaagtatagcacttcaggcagagtagaagaattttccaatggtattctcccattttttccatcttgtcctttacgatattgctgtcatttattttacttatacatatgttataaagttcataatatgttgttattatttaagcattcaactatcttttaagtaaatgtaaataacaaggaaaatatattta[136 bp omitted]cccgggttcaagcaattctcctgccttagcctcccgagtagctgggactacaggtgtgcatcaccatgtccagctaatttttacatttttagtagagacagggtttcaccatgttggccagtatggtctcgatctcttgaccttgtgatccgcccacctcagcctcccaaagtgctgggattacaggtgtgagccaccacgcccagccttttgccactactttgaatgacaaaaaccacaattaatacaatttctggtgctcctcattccttttgtgtgaacccatatttccatctgatgtcaatttccttttccttgaagaaaaatctcttggaatacagatctgctggtgatagatatgctggagtaaggatctgctggctcttctgcttttatatgtctgagaagacttattttgcttaatttttggaggcatttttactagatatagatttttagattgacagcttttttttttcttccaatacttgacagatattgctccactgtcttctctgttgcattgtttctggtgaggaatctactgtcttccttatctttattcctctgtaggtaatgagttatttttctctggacgcttttaacattttcttttataactggctttgagcaatttcggtatgactttgctgtagttttcttcatgtttcttgtgcttggggttctttgaacttttttatgtggatttataattttcataaaatttggaaaggatttggccatcattttataaaatttttgtttctgccctcccacctgccccatacttcttgaaacactctaaataccagtatgttaggccactggaagttgtctcattgctacattcttcattttaaaaatccttgtttttctatttcatttcaatctcctcaagttaactaatcttttcctctgcaatgtttaatttgctgttcatcttatccagtgtatttttaaaatcaaagccattgtagtttttaatctctagaagttcaacttggctttttaacaaatgtattccatgtccatcctttgaacttatgagatttagctataaatgttttaatgtccttgctggcaatttctaatatgtgttcattctgggttattttaattgattaattattctcatcataggtcatattttcctgcttctttgcatgccaatcatggatgccagacatcatgattggatgccagatgtcatgaattttaacatgttgggtattgaattttttatatccctataaatattcttgagctttgttctggaacacatttaagttacttagaaagagtttgacccatttgggttttgcttgaagatttgttaggcagaaacaaagcagcttttagtttagggctaattatttcctgttactgatgcaagacccttgtggatactttaccaagtgttccatgaattatgagggtttccagtttgactagtaggaataggcactattcccagctctgtgtgagtgctgccaggcactgtttcctctcatcttctcaaatcattctttctctggttttgggtagttttctcacatgcctaccccaatgaggaatatgctgaattttcaaggaggatttttcagatctctggagttctgtctctgtgaagtcctctcctctctggtgctctgtcctgtgaactctggttgtctcggtctttctggactcatagctctgtgtccttgactcagggagtcactgggctcaacctgggtccccctccctgtgcagggctggaaagtctttcaagggcataagctggggcaatcatagtgctcacctttgcttatttctcatctctttggggtcaccatcccttgttgcctaatattcaatgtcttgaataattgtttttcatatattttgtttttggtgttactgttgagggtaagtccacaagctgtacctacatcttggctggaagcagaagtctctgaagtggaagcagaagcctccactgccatcattcgtccaggccatctcaataacaggctaattttaataccaataacaataacactaaatgccattccaaagtaaagagtagacttgtatcaggtggcccatctctactacgtgtcattgcttctccattcagaaaagagtgacatagctgcttcacaactgaagtactttcatagctattgccaaatctgatcctctcaacagccaggtgacgtacgtaggcaggcattcggccatttgacggggagagagtttgaggtccaaagaggtatagtgatctgctcatggctacctagacagcaaatgggagtcagaactataaccaggacctctgtcctagactctagggatggatttgctgcttcctctctcctgcacatcaaggcaccaggcaggggccttagctttcactcctgatcaataatgagacattcatttccccactgggaagaaggaggatgagtaatccactccccctgctagaaaacacaaggggaagtgatgcagcaatcaacgccatcccaggcgagcctctgtgctgcctggattcacggcacgcagggcacaatgctgtatttttctgaccattgccatggtgtgtggacaaaatatgagcacgtttccttggaaaacttcaacagtgactcaccctcatttctaccgggatcagttgaagaatgggcaagctggtagttggggggagggaatagccgggagcaaaatcaggacacagataacagcaatgtttgctacctgtcagcaagtgggttgctaatgcaaagtggtttcttaaaagcttggaaaataaaaacaacagccattacattcaaagagaagttagcattagaaaacgatgtgtagctctgaaatgaattctctttaatcaaggatctcattttctcttggttaccaaaagttctgtccacatggagtggtcagaaggctctggtccctttgctggcctgcgagctcagaagcagcatggggtggtgaaaagagcacaggctttggaatctgaaaggtcggggtttgaattgtatctctcccttaccaagccttagtttccccatgtataagatgggcacagggaagcctatcttgcaaggtggctgtgatgaggcagcctggataaaggagctggtgcacggtgctcactcattgcgaccatcacaatggggatcccgagagactaagaacagggaacaatggggttgataatggcagctccactcagtgaaccgtgatggaatgctaagactcatttacagagacgtcctcatggcaggagaagatgtttatgggaaacaatgttgagggacaaatggagaaaacaatatcaaaatccaatggacaaactgggctagagatgatcatcggaagctgctttacccagaaccctactgaaggggcccagccgctatgggctgtgggtaaggggaggttttgaggaagtggaaccttgtgtaagcagggttaggagtcctgccaacagagggacagaagagggagaggggagagaggacaagggagagggatctgaggagagagaacaacagagagaatagctccttagctctcagtcttagtaccagcaggtgtgtgtgtttgctttccagtgagctcttcccagccttcagtaaccactgcctttggctctagcctccgaggctctctgctccttgtatccccaggagccctaactgaggcagaaacagagagttatatagagagaaaattgcaaggaaagataccaaaagcataaccattactttcaatagatggaggtgctatgggttatgtttttctatttttgtttcctccctggcattttctacagtagccatatagtaaaatcttcaaggaaaaataaaacaaaagcatggtccacaggcctctggggctgctgttgcccaccctcccttctgtgttggccctgccccttgtcataccctctccatgccttttttggaggtgctgtgtgcctttgctggttgcaggtctgagtggtcctcctcccctttccccaggcctggtaatttccacttcgatttgctgagctgaccttccttcccgagcacctggggttcctcacggcatctgcccaggagaaggcctttgggttccatgtctaggttcctctatctctgagttcctcagagcttgccttgttctcctgggcagaataaaagcagaacacctgagggcaactgcaggcagtattgctcaatggttagagccaggcgttggtgcaagctgattccaattctaggctgtatcactttctagctgtgtgtcctttagcaggtttcttaacctctcagtgctccagttgtattttctgtaagatgatctccagtcattgctacctaattagatttgggaggtacacctgagatactgggtatgctgcatttagaaaggttctggactttatagataagactttcaaggaattgtaccagttatgatggtgagcgtggtggctccactcaatgaactatgatggcatgcaaagatggatgttacagaggcctcctcatgacaggtctgatatcagttatgattccttgaaagtcttccgcagagtgaggtcacctccactgccatgtcccctctgagaggtggtaatatggtttggctgtgtccccacccaaatttcatcttgaattgtaactcccacaattcccatgtgttgtgggagggactaggtgggaggtaattgaatcatgggagcggtttcctccatactgttctcatggtagtgaataaggctcatgagatctgatggttttataaggggtttccccttttgcttggctctcattctctcttgtctgccgccacgtaagacatgccttttaccttctgtcatgattgtgaggcctccctagacacatggaaatgtgagtcccttaaacctttttctttataaagtacccactctcgggtatgtctttatcagcagtgagaaatggactaatacaggtgggaagccctgcttgtccttctcctcactgaggttctgaatatagctaagcccagattcctctccctgctctgccatcagtaagcaccagaaatgtgttcaggaaaggggcgagacagtcttcattatcaccctttcaggtcacagaagcagctgcctcagtgatgaggctgttttgatgcttgacatcagggcagcctgacaccccaggtaaaatcccctcccctgctggtctgctccttctgctggttcccaccaggccttctgggggaaacttgggggctcacttcaattccacaaacaccagctgagcccctactatgtcctgagcactgggacaggtgctgggcatggataggagttaagtctccttcccagtgtcagacacagaacaagcaaaaggcatggaagtgaaggacccattgtctttacagtggagaagggagaagtgacttcctaaaactgagagcaggacatcccagtggtacagcccagaaactgagggcattgagtagggaagaggagaatgtgattttaggagctaaggaacagttaaaaacggctgtcaatctaatgcaactaatcaatccaattcaaattaattgaatctcatctaatcccctgagctaattaaatccatcctacatggatggaagaatagcatggtgactggcactgctagaacctatgccctgccctcttcaatgatttgggggaactgtggtctctaatcccaggtaatttaaaaaaaaaattctaacttcaaaaacagacaaaaatctttcaaacgttgcttttccaaaaagggaaacttctgagccataggcctcttgctatgtccttgcaagtgctaggagcagaagtagggtctgatggaggctgtccactaaggaaggtattacaggggcagtccgggtaggaggctgtgcctggctacacggagcaggctggacccctcctcctttatgtgagcctgtctgtctattaggagtcgggtccaaaccataaaacatatttgtaaatagctgcattatgcacatccttaaaaactgcacaattaatatatgaatacataaattcacacttataaatatgccagggatccagtaaaaatgaagaatcttcctgcacactcaattgtgttctcttcctctgagcagctctcagtatggtaggcaccactctagactttttctgtgtgctgatatgcatacatgcacatttataatcatatagtttagggtgtgggtatttttaatacaaacgggaccaccttgtatgtattgttccgcaatttgatttttcacctaccaatatgtcttagaaattttccccaagggatctccaaatcttccttacccagtttaactgttgcagggggtgggggaaatgcataggcatcttccctcctcagtataatcatccttctattgatgaacatttaagttgtgtctaaatttctgctcatacaaacagtgctgcaggaaagatctttatctatgttgtttggtgtacatgagtatgtatttctttagggcagattctaagaagtaaaactgccaggttgaagggaatgcatgcttttttattttatggatgtgttgtgccacatccccacccatctccccagcccagaggctctaccagtttatattcccctcaacagctgtcccagctgccctctctaagagatgggtggcttctttgctgagatgcagctccccttctgcttgtcccttctgtggtccccttggctctcctgcagaccttggcccaaggccatcttcctgtcctttgtcacccaaatgcatcaaaggccctattttaagaactctgagtactatttcaaaacacacagcacataaatcgggagtgatgactctcatttcagaatgatttcttcttccacaagaggatctgcttcagggtttggagcaattgatgaaccaatattgattatgcctgccatttattcattcattgatttacagtgttaggcttgtgctagctgctgcagaacccttgccttcaaagggtattctctcattggatggagcaagacatgcaaataacttacgttattaggtaaagttatattaatagacaattgactgctattaaaacattttaattactcaaagagggagagagagagggagagagacagagagtgaaagatctcagtaggtgagggaccagaggtattttggggatggagcagtctaacagataagcagtatgatttactagcccacagagaatgattactgggggctgtccagcccgtttgtcacaacataaacaaatgcagggacttctccagttgtgatggctgggcaatagttgttttcaagcctgaaggaggaggggagaacaggaaagaggtgtctttttcagacccctccttcccttacccttgtcaagggagtgtgacagtcagcaagactgttcatattcagtcattcattatagttgatatttctaaaagacgtgttggtgattctttaaacttctcagttgccaagaaaaagatgcaacagcttttggcctatgcatggaagtgtcctctataggccctttttccccctttaaaaaaaagtcagaaaccaaggccacaccatttggagttcagacagtgaactgcccatgaatcaaaagataacgtgacactgggcagcaggaccaaccaaagcatggtctgatttattaacttgtcccctgagtaagataaagtaggtgagtccatagacattagggctcctttcttctgcctgggtccaaggaggaaataagccaccgagagataagcagccagcttttgatgtcagatccagtgctgagtgggtgcaggagcagccagttctccctggagatgctagtgagggtgggcaccaccaagggtctgcaccatggacccaggctggggctgccatgtcagcaccatttctagcttatcctttcttccaggtctcaataaaaagacttattttttagttcctagtgttcaaagagtatttaagttacaccatatctgaaggctaagaatttaaatggacagtaaattatttaagttagccctcagagatcattgcacaatattcgatccatccttcattccatctaagaactgtaagacctaatcttttcccgtaagagtttacagtatactgggggcatgctaccagacaaataatagctcttttagttgattgattgattgtagaaatggtgtcttgctatgttgcccaggctggtctccaactcctgattctccctcttcagcttcccaaagtgctaggattataagtatgagccaccacacccagccagctatagcccttactccatgattgattggttgattgattggctacctctcctgctggcctgtaagctctaagaagaaccaggctagtcttgtccactggtaacctaacacctaacacagtgcctggcacatagtaggtgatcaataaatgtcaatatgagatgatgagagagtaggacaggaagaaggctcaaggcctaagtggggcagtgtgtagatgagagggggctgtgtgctggagggcagtgagatataatcactgggaaaagtgatggtgggagcccggaggtagaatttgggctttattttatgggttgggaaagacattaatgggtctcaagcaggctgtgacatgataaagtcctctctctcacatttatttattcgttcatttcatccaatgcaatttattgaacatcttgtatatgtaaggcaccatgtaaaatatgaagaatagaagtatgatagaatcatatccccaaagaattcccagtttggcaggggagatagataagtaaacagacggttataatgtgtacattttatgctggagatttccacataatactctggtatggccatgtttgcactgaatcttggaggaaggacacatacaagtgaggtgatgaaagggtgggaagggtgttgctggcagagggagaaaggagagagtgtgcgatgctgggaggagggctctgtttaatgtggctggggtgttgtgtgggaggctgggggagtagagtgagaggccactgaaagagaggcaggagccagactggagaggtctgtgaagagattcttggacttcatcctgtggttcatgagggagggagatgagcagggctgtattttagaacggtcatgttgttgcagagaatgggttggggagggacagagtgagcactggggaggccagtgaggcagttgttgttcttatctgggtgaaaaaaacataaggaactgaactaaagtagtgtctggggtgggggataataacagctagcatcatttgggcacttacggtatgccaactgttctatgggtattacatgtatgaacccacttagttttccggtccccctgtgaggtaggaaccagcattatccccattttgcagatgaagagaatgaggaacaaggttccacaactagcaaatggggatttgcactccggccatttacagagttttgaatctaggggagcatcaattatggggtgcaggtgtggggacagggagaagatgaatttagttttgcctgttgatttgggatgtccatgggactctaagcgaggagttcagcagcccctggaatgttgggtctggagctcaggaaagaggtccaggctggggtggcagtctgggaattatgggaaaggatgctgtaacctgggagaggacaatacagcaacctggagtaccactaggtaaggggtggcaggggaagaattgcttatgaagggggccaaggcagagtgggcagggaggtgaaaggaagccaggcaggagtgaagaggagtgtctcagggagggtgtggtccacagtccacatgctgttcagaaaccaggtggcataaagactgaggagtgtccctgtcaacagaggctgggtttagccaaagagatctcatgagcaaccttgacaaagaaaagtttcagtggtgtgctggaggtggactggcaagaaaaagggaaatgaagaatcagggataagcgagtactgcaggccccccttatccacggggatacgttccaagaccaccagtggatgcctgaaactgcagatagtacccaccccatatgtatcatgtttttttttcctatatatacatacatacatacatacctctgataaagtttaatttataaattaggcacagtaagagataaacaaaaataactaataacaaaacagaacaattataacaatatgccagcatcatgactcttgctccttggggccatgattaagtaaaataagggtgacttgaacacaagcactgccataccttgatggtaaatctgatcacagacacggctgctaagtgaccagcaggcgggcagtgtatgtatgcagcgtggatatgctggacaaagggctgattcacgtcctgggtgggatgaagtgggatggtgcgagatttcatcacgctgttcagaatggtgcacaactgaaaactgattatttctggaattttccatttaatgttttcaggctgcagttgactgtgtgtaactgacatcagggaccgagaactttttggtgactctttgtcaggaaggcaaggagaggaagaggctgcaaggtagtggggaggtaaaataaagaataattttatctcctcctaagactggagtatatttttatgggattcagtttttgattccccaacagtgctaagcacaatacctagctcatcctagccaatcagcaattctttgaagaatccttctaattcctccctcatcctctgctgtcaagtccaccttgagaaaatcaagcttatattgtgcaggaaaaaatggtgaaaacttgactcttggcaaaatcgtctggggatctgaagatattactactttagatgctgagtggcaacaagtgattaagtagctaaactagcatatgcttaattgattcttattcttgggctattcatgggaaacagtgtaccctgttgatggtgaaggcaatgtctacacagcgggccatctcaccttgtggcacctctccagtgctttgatggggtggaaatagatgcttccatatttatgcggctccatctttggccatttggaagtcactaaagtcatgtgtaataaattctctcttctgccttgaaaaaaaccaactgggcaagcttccatttctaatggggtccatgaaacatggatattaaggaccatggatctggctgtcagattgacaaatgagtcttcccttttgaaaggcacttaggaagttataattggaagcttgagaggagttgtcaaaagcaggcagtgggcatcccaccaagctgctgggcctttttatttaggggtggggtgagggatactgtttcttcttgtgagccatggtgggattcccttcaaatggtggaaatgtggccaacttataccagaggcagaggcttaggcttctgtaggagccaactggtcctgccaaagacctaactagagctggcaagacctaagtattcttatttgcctttattgtagtctaaacaggctagagaggcagtggttagatgcaaggtgttgtgtgatggtaggcattctcagggcactttagatacagctcaagtgatataaagtctaggttgtggaatggaaacccttctcattcctgatggtttccagctggtagtgaaagaggttcttggtgacagtgggaagtctctgggaagggacattcaaccctggctccccaaggtgtttctgaggctgtcaaatataaacccagggccaagatttccaggaaatttcccgaacaataacgttggtgggccaactaattgcccagaatctctagattcattcccaggaccaccaagaagtataagcaaagtggttgaataaatatttgatgaatacatggatcaacacttagaaaacaagaatcaccaccaggctctttgaagagagggtgggagatgatgaaaggcttctgatatcaaatcatgacttggaagtccaggcatggtggcttacacctataatcctagcactttggaaggcagaggtgggtggatcacttgaggccaggagttcgagaccagtctggtcaaagtggtgaaaccacgtctctactaaaaatacaaaaattagccaggcatggtggcacaagcctgtaattccagctattccagaggctgaggcacgagatttgcttgaactcaggaggtggaggttgcagtgagcagagattgcaccactgcactccaccctgggcgacagagtgagactctgtctccaaaaataaataaataaataaataaataaataaataaataaataaataatcatggtttgagcaaagagtctgattggtgatgtcaacgttgaagacagcttggtgctgtccccataccgcatgaatatcccagctttgcagtttcacatatatttactcactcatttaattttccccgaattccagaattctgtgctggctctcttatctgttcatccactcttatctacacagatggcttccagatctatatccctagccctgacccctttcatgagcttttgctttgattagcttgtctaagccagaaacgatatgaatatatcatccatcacagcccagcttcataacctcagggagacgggctttcagggcagatttttaatgggacagttggcagaggtgagttaaggaggcagcagggagcattagagtataacattggattgattatccagttgtacttccaacaactcacatttatggatcttatctataagcaaggcactggggccacagaatccaaaagacacaatccttgctctcagagggctctgagactataagagacaagggctgagagaggcaaaagaaggcagttctggagaggtaggtgtcaggagcagtgatccacatgaagtaagcctacatgggactgttgtacccttggaagtgtgacaaaaaatgccaaatcccccacttcattctgtgagtgctccaagacaggggccaggtctcgcttatcttaatttttccagcacattcagtgctcagggaatatttgctgagggaataaatgaatgtacaaaatattgtatggagcagctaactattcctaggaaggtggcaggataagacagcaaagtcttcttaaaggccatgacctttgggtggtatctggaggtgtgaataggcctttgccaggtagatgaaacaaggaagggcagatggaacagagggagcagatgcacagaggctgccatcaaagaacatggggtgtttggtggatggttctgcatcattgggatgtagggtccatcctagtcaaccacaggcagatgaggaggttggagaggtgagctgtggccaggctaggcagggactccagagccattctaaggggtttagatttttgtaagttacagaaagccctggaatgtaagggtgttatgttgggtagtgctgtgaccactgaggatgtgggttgaggaaggggtactaccaaggagggtggccagagcctctctcctagagttttaggctactccaccccagctcctgcttctcactagcaggagcccagattctgcctcccagagctggggagagggtttatctcacatccttgtcataatttaccttataagcatcccatgccagctggcagagccgggagtgggtgcagaactgctgtcagccaaacttcctggtgatccttatgtccttgagtgagcaggggcagggactcccaggtggtgaatgctagaggtcatttgaagtcatctcatggaatcttctcattttacagatggaaaaactgaggcccagagagggcagtgacctatccaaagtcccatgacacagcaggactagaatccaggcctctggactcctaggctgatttgttctccacagtactgagtagccttatttctttgggctcatggtaggaaaagaccagcctgccagccagtccctccctggattagctccctgtgcgctctctccagagagtcttcctgagttacaactgtgcagtgtggcagagcagaaagagcatgggtgcgggaacctggtagattcgggcttgaagcccaaccctgctgctcccctagctacgcaaccttgaacaagttattcaaccacgcagttttgtcatctgcaaagtggagatatcagaaccccccctgcagggttgttgtgggagattaaatgagataatgtgcctcaagtgtccctacagcataatgcctggcaggtagcatgtgctccattgataggaactgttgttattcttctacccttcccagggttctatttctccttccagcatattatcccgctgcctgtctctggtggtcctgggattgtgcagaggattttacagcaactgagttaaccagggcacttcttaaggttgtctaggaaggcagccaaggcataccttgacttatttgtttttagggcaaatgcaggttaagaaagcaatctttggactgggttgtagcccaagagtatattctttaggacaataaaataaaatttaaaacatttggaaaggcgtggtgtgtgtgtaattatgcatgggtgagataattttcaccatgcagaaagactttcccatttatacaaagattcatggtaggacttctttaagtcactagttcctcttagggctcttactctggagtcaattttcctagcatgattcacaccaactttccaggaaagggctttctacttcctacgacttgtccccatggccttcctgcaaagtttccttaaactttgagccaaagcagcagaatcttggattgatagcaacgtagctgccacattttatggatataccatatactataagatgcaccatgattttatgtatcaccaagaaagaataacaaacactgcttattgtaattttaagacttaattgattgtaaaacgaatccttatttcagaaatgttaaaatgtgaacacaaatatgcctcttaacaatcaatgaaatgaagtgtttgaggaccaggatcaactggatagatttgcatactcacagaatgagagcatacagctggggctaaatcctcaaaatatacttggcttaacattatttttgcctttgttaaagaaaccgctaatctacaggctctgtgagggcagagactgcgtctcttttgtttaccactgtatctctaccacttcactcatagtaggtattcagcaaatatttgctgtatgaataaatagaacaaagccacaacatgaaagagatggaaagcccacagaagaaaataaattattcataattcccccagtgtgggtattttggctgatttccttcaagtcttatttcctatgaatatgctcttttatatacatgtaaatataatgtattattagatttagctctgggatgtgtttttgtatttctctattaatataaatgaaatgatgaaatgagatgatgcggaaatgctttgaagactgtaaaatgtttaacaaatatcttattagttataataatcatgaaaatacagacatgaatggggctgattttctgagaatacacttcaaagctaacagcaaatttgccctccgaagctgggaatatgttctatttcctcatcctactcaccatagggagtccttctgtttcatattgggaagggaaagagaaacttaaggattcctagaagtcatagctccgacttcccacccagcccagaaatttcttccatcttactaatggaagatcagccagggctaggggaggaaaaagcacatctctcaggctgatgaaaaatagcagcctacagagaacttcctcctctccaccccttactagtggtggggagaagttacacactggattccaaggaatgttgttcacttattctgctgctaataacaatgtagatagcaaagagatgtcaacacaagtaagtaattcatcatagtaggggtaggtacattcaacaagccacaaagtcagatttgccatggacaactaattaacaatttacttttagaaagtcacagaatttatacacatattgatgagtctaacctgttcctggttctttgaagggatgtgggtttactcatacaacagaagggagtgctgaccgattttctctccttgaccagactctagccaggctcttctgagccctcttctcttctaagcctcacccttagttggcctatgaagacttgaacaaacactatcatagtttctaacagcccaaggtcatatccctagaatacctctatcccctcttaaagtgcctgcctgagaaaactcgaggctgccaagagaatttactctttgctccagccaacacctgaatatagggcccctgtctccccgtctctgtgggagggtaggagcctaactaacttcaataagcaccagttagcaaacccagatgcttttcacagggaccagcacccaagccccttcctgttttttatgatttttttacttctctgactctgctgctcaagcccttgctgttgcctctgcccactccctcattctctctttgaaacacccaggccctctctatgaattggggttgagttcagttcatgctgcaccctcttccctactgcaaaagtaaataattgattaaaatctgccctcaccatgtcaacccatgtccagctttgtttacttttgacagtactgaggagctcacctaggctagtagctcaggctctcagctcacccaggctgcctgtccatctgcatgtctttactggataatccttgttctcactcttcttgactctcaaatccttagccttgaactttgcccctgccatcctcatgccctcctttgtcctcaaggatatattttcctggttgcaccatttggtttctaccttgcatacccttggatattcccttttctgcttgcatcacttgtctcagtttctgggatcccatagaggccaggctaaccttccagcacctcctgctcctgcatcaaagctgcaatcccattccctatgtgcttcagtgaaggttgaccttggacttcattaactgcccaggcattgggtacagggcacagtttgtgaggcctatgccatcaacactttcccagagagtaaaaaacaatatagctcacgtatagatttacaaccagtgttttttttttttttttttttgagacagggtctagctctgtctcctaggcttgagggcagtggtgcaatctcagctcagtcagctcaagtgatcctcccacctccaaccgcccaagtagctgggatcacaggcatgcactaccatgcctaatttttttttttttggtagagataaggtctcataat[132 bp omitted]taaaatggctaaacagctgtgatcagtaccagatgaaagatgacatttgagccaaattttaaaagcaagctgagctcatccattacgtgcatgtatccttccttgctcctccgtcatggttctccctgagtctccctttcccacaccccagagcaggtgccttcactactcactgacttagctatgcctaaggtcttccccagaaacttgtcttagatgatctggtttaggattccctcccagtcactgtctctccagtttttattctaggaaaaccaggcaacaagtattcaggagataaaagaaagaaacggagtccgtgtctctccgcagtcctgctttgagactgcctccttactgagagtttgcgaaggtctcccttttgagatgtaagactcgcttcagacgtgaggctgtgcctgtcctccctccacccacagacagaattgatgcagcagtcccagctggccagctgaggtcccctccccagcgctatatcaaagagagcaggcaggatcccatgtaacaagggctcgctccacttaaactctgtgatgggagagggacgcctccaccccttttctttttgtaggctgctttgaattgtattaacgcaagtgatgaaacatatcaagccctggttagcagttttccttagcatcccctggccaaaaaaaaaaaattttttttaaattaacttgtacaaaaagtcaactgtaacagaatgttctggaaaagaaaaaacccaaccagtttggtgaaaagaaaaatgagctgggtttccttcatgcccaattttagggaacaacaggtggtacaggagaactggtgacgaaggttagccaacatctttctctagtttcacagtaaagcccttgaccgagtgggaattccatttctcctccttgtgcctctgcagggggtcgggggaggctgaggaccatcaatcctgggagcccagggaacttaccctctgctcctgtgtggccacaaaggtctggaaccctggagccaccccaaagcccagctcttggatgaaaggtggctcagactgactgtggatctgaactttcactcctgcttcaaatgtcgtttcctctgaaagaacaaagatggacagagccacgggtcagtaacaacagatgctcatggagtcctgggattgaaaagctcaaagggatgctgaaaagaccctgtgataagcagaataatggcccccaaaggtgtccacatccccacctccagaaactgtgactaggttgccttacatggcaaaagggacattgcaggtgtgattgagttaaagttcttgagacggagagactaccctaaattatgcaagtaggacccaatgtaatcacagaggttcctatgaaagggaggcaggaggatcaaggtcagagagagaatggaaaaatgctatgcttctagctttgaagacagaggaaggagccatgagcccagggatgcaggtagcttctagaagcaggaaaaggcaggggaatgaattttcccctagagctgccaaaaggaacacagccctgccaacaaccttgattttattgagcctagggaaatccattttggacttctgacctccagaattttaagataacgaatttgtgttgttttcagccactaaatttgtggtaatctcttgcagcagcaatgggaaacaaattcaggtcagtttgccaggtcaactccttgcctcagttgccaaatctatagaatgagattataacataagtcaaactcctttattttattgattaacttttcttctgggtcatgaactgaaggtggggatatcaggaggaggaaaacatgatgcagcagtagaaataaaaatgcagggctttcttgtatgccaaggtgtttgccccttggggctgcaatggccaagtagaagagaaacttccctcattttttcctttggcagaagaaatggcccttggcagtgggaggttgggggcggtacagagccatcatcctaaatgtttagtgctcacaatcagtggaaaatgaacttatgggactgtataagcctttaccagatccccctctctgtcttgtcttctccaaacagtctacagaatgagctctccaaatgtaaactgtataactccctcccatgtttccaaggaccccaggctccttacccaccccttccctagccttgttctgagtagcctctgcctcgaggcaccatgcggggctgcctggattgggcatcactggtacccactctgcacaaatgcatctccttctgcccagaatgtctttctaccttgtccacctgaccatcttcccacttgtcactgaagattcagctctccatccccacccaaagcaactctttctcttgctctgttgtatcttccacatctgcctgctggagcccctgccatagcacatcgtgatgaggctttaactgtttcctccagcaggctggagtatcctgaggccaagttctgggctgtctctctggacctcaaaggtcctgcacatggctaggcatacaccaggcactcaggagatgcctaatgaatgaataaatgggagatttatgggtcaagcctcaatcatttatgaatggacaaggccaacctggaggccaaatcaaggaatgttctcaaagaaaaaaatggagagagaatggataaatgcaggaaggagagaagataatgatggggttgggggtcagggatggagagggggaggacatgtcagcactcaggctgtggcttggggagggtttggggacaaactaaagctggcacagaagagagtcactgggaaggaagggctgggtccagccacgggaaaggcatgacccatggaaagtgtgggggctattgactgaggtaggtgcaggggtctggagcagggcaagaattccaaggccaggggctacgtggaaagaaagggctagcaggcagacaggaccccagggaagggtaggcagggctttcatcatttagacaaggagaccctcagccaggaatccttttggatatggttcatggagtgggagagaatccaggcaatctacaaacacatcccacttccctccagtacagtcattgttctgtggtttctgtacagcatcaccctgtccaaactcctatccatatgctcctggaagcctgtggctttgtgtcaatctctcctattgatggtgaattcctcaagagagaccatattttattcagtccagggctccatcacctaacccagggcctggccctcaggtggaacctcaaggaaggtttttagatctgggaggaggacttcaggaaagggaggactggatggaatgagggggttgaatagtcatctttcagtggctgtgttttcaaaagtctgtccaagacgggggttgaggagagagtgtggagcctgaaaaacagactcagatggggaagaagggtgagtgtggagggctgttgggatgacagggatgcccctgctgggaggaactgaaggctccttcagtgagccgtgggagggaacaggagagatgccagaacttgttttcgagagctagctgaagccgtgtgtgcctgctatacaaccaagcttaagaaatcttacagccagtaagacaggctcaaaagagaggacctgtggtttacaggagaaatgagaaatgaaggcttcctgtcagaaatgccatgagtaatgggcaaaacatacaggcctggtgtgcctctcttagtgagaaccgcccaaggctaattgaactgggttcggatttggaagaggtgctagcttattctgaaagcagcagtagctgcagctgagagtaaaatcctaaagtagcctcagtttttaaaaacatccagtggctggatggacatgagtgggagcaggtgataggtaaggtttctgctctctttagagcactgcggaccagtggaactttctgcaaagatgggaacgtgctattccctgtgctgcccaacatggtaggtgccagttatgaaaggtggcttgtgtgactgaggaactgaatttttcattttatttaatgttaattaattaaaacttaagtttaaatagccccatgtggctagtggaaacattgctggatagcacagttctagaatatccagctatgagcagactacagccctcccagagctgagggggtgacgagaactccgccatcttgccttcctaagcaggtgctctggagatgcccttgtctggagtcctgggtagtttgggcagggttccgagcagcagatcagtgtgtcttcatggtcaaaccacgaccatagttccagatcctctaccctgctttccccaaagccctacttgtacatctacagatgcatttctttctatttcttaccagaattgcccttggcttccttttaaagattgctttccaggttggtagtgaagagcagctccctgcagtccctgccctcactctcttccctttcctgggcatggcacagtattgagttgaagacccaacttgagagctgaagtaacaaatgtagactgttagagccaaggcaacttcacaccatccactttggaggttcccaagctagaatgcaagttaaaatctcctagatggcttgggtgatgcttcctgggatccactcccagaaattctgattcagtcactctggagtggagagcaggaatctgcatttccagaaattctgatataggtctgaggtcatctacatttgggcagtgatctagtccagggaagggaagtgacttgcccaaggtcagacagcaagtcaagagcagagcaggggctagaagccaggtctcctgagttctaatgtggcactctttctactccaccaggagtgtggtttatttagtgtgagcagatgccttaattcatagctctggagttctgaatgggggctgagggcatgggatatctttttctttgtaatcacccctaatgtccctagcacagtagctggcacaaagcagggctcaataaatgtttgttgaatggaacaaatgagtgaggaagtatcccttgcttatgtctgctgttccctgctgtatctggtcagctgtgagcctgcctaggttctggaggacactggtaaacaccagcaccgcataattcaggagggctcacctgctggcatgcaggtggggctgcacacacaacaacaacacggcaacaataacagtaacaatatgactgcactcatagtttgtgggtcccagtgccaaatgaaaatgcaggaccccttgttaaaaaatgttgttaaaaatttataaaagtaagcattgttattaaaaaataaaagaatttcaagacagcaatctcaagagcattaaaccaagtgagtggcccttctgattgtgggccctgtgtgaccgccctgatagtagcatctcaaactggtgctggacagaattgttcacatcctcatatttgtcttattggcaactgattcaatgctaagctccttcaaagagtgtaggtctctggacagtgaatgatttgtttacacatcatgaacaccaggattcaaggacagaaagagagagagagagagagagagtgcagagagaaagggaaagctactacatacatactatgtagacagtatgtacatgggagttcttgttaattggtaccaagctgaaacgcagacagcgtaacatgaaagataatgctgaaccaagaggagtgtggtaagatggagttcagcctgcagaagccacagtctcccagcattttccaagagcttggccataggtggcacaaggtgagatctacctggccagggagggaagtgcattttctgaatatgcagaaaggacatgggagccctgtaggaggaggcaggagcaataggcagaatgcataacggggcagggaaagtgcatcacgataaaagaagctaaaatctttcatcttggcaaattacggaaaacatgccaaggaaataaacactggagagaagtaggaagaaaagtttatctgaatagctagggggagttttcagagctcagagagtgaacgtgctgatacaaagcaatcttgctttggacaaaaatgactttataacagtggctgagtgggggaaccctagctccccagatagcttcagaggagagggtgggacaatggccagccatataaggggcatctcacagtgcagcaagggccttgtgtgggtatgggatagcttctgtttgcacccccttcccagtgcttctccaccctgctctctgtgctacgggtttgacttgcagagactgtcttgatggactctgttgccctctggcttgggatcagttaatggtgggccaggtaggaaactggagggagagaggagagtcaagctggggtgtccagtctctcaactccatttgctgggtcactgtgggttagctgcatgtcactttggaaggccacagctccgggttgggggctggagggagagctcttcatagtgtctctctctgggttttgacaccagcttctttccttctttccgagggggtggtaacggctctccctgctacaagtaccaggatgctgcactctcctgtattgcttttccaagccttgcccatgcctttgttaacagtctttgattaatttctccttttagtattcaatttgagggtgctgttgatttctctgcttgggtcctgactggtggatctcccatgggctctcacttaacttctgatagacagcaggagtcccctctgtggtaccacaaagggaaggacggacattgggtttgagcaagtgcatagggatggagacctcactccctgcaggggcagcccatggttttggaagttcacccttattttggttgaaaactgcctgcttatagattttgtcccctagtcctagctccgccccttctactccacacctctttaaggatctccccagagatagagtgcctgtttcccagacaagtgagtcggactttctgagagaggcagaaatgcagacctcttgtacctggagcatcagaaccagagagagcctagacaaattgattaaatacttggggctgtgggatcaggcaagttgaagtctagttcagttctgtgaactatagcaagttatttaatctcttggagcctaatttttctcatttttaaaatgggtatgaacataaaaatggattgttcttcatagagctgttgtgaggcttaaatgagccattgcatggaaagttcttagcacagagtttagcttaataactcaacaatttgcagtgtcatcatcaccatcatcaccatgaattcagtatttctggctttttacaagatccaaggggatcagttgctgttttatgttcctctttgctcatgctagtccctccatgtagactggcccctcctctcatcttccatttggttaccctctgcccacctttgcactcaccacctcctcgacattttccctccattcggtgccccaatgtctagtacttaccatgttcacacttgatcccaactccctctctgttaagactgagagatctcttggggacagggtcaatgttcatttatgtttataatcacagtgcctggcatgcagtaggaactcaaaaatgcttggtgaagtgaacaaatgtgcacaactcacctctgagacagaggatcccaccctccttgttttacagatgtgccaccgaggtgctgaaaggcaggtggatctgtgtggatctcacagggagtttgtggccaagctgggttcacatgaaacctgctgagccagctcagaacccctgctgcagcccagtgagtgggcagctgtgtagggacttcaggccagaggctgacaagtgcatgggggctgggcaggggcagcaaagtctgcctggaccatcccctgaagggccgtggttggcattcttgtcttgggtggctgatatctttctggtctctgctgctcatttaatcatgtggcttaatccctggggacctgttcattaaggcccatcctttgggcctcactgctacctatgatcagacaaatgggcctggagtgtccctgtgtcacccaggcatggggaggggcttggcccatcagcagctgggccacttatacccggcagtggcatctctggctaccactgtcaagcacctgctgtggcactgctctgcattccctaggagactataaagtgtgtgtgtgcctgtgtgggtgtgcatgcagacgtgtactagtgtacgggtgtgccagagagagaaagcaagaaagagagaaactctctctgaaatacaggaacatttttcttatttcttcttatttccctaaagcatttcctgagatgctgctttggagttcatagaagcagaaaggaacaactgaccctcttaaggacaagacccagagctggagcctcacagcagtccacattttttccctcactccctggagttatgcatcgaatgcctaccatgagcatgtgccaccggccttggacctttgcctggctggcttggagttttaactaaatcatgtctattttctgcatcacacttagcatgtgcatgaagcacatcttcccagaatgaaaaaagtcaggctgcttctggctgctaaatggatacctgcctccaagcgtgtttctgatttatggcatcatttctccagagtcctcggacacctgtggagacccctatccagcacagtgaagccaacagcatggtgaagtctctgtcctcctggagctcatgttctgatgggggaggtggacgataacaaacaggtacacgtgtaacatcaggctggcgatggaaagtgctaggagaagtgatgcagaggaagggcagagcaggtgtggctcgcttggttgggagtcaggaaaggcctgttcaaggtgagggtgtttgtgtagtaaccagaatgaagtgagcaatgagccatgggatgatccgggagaaagtgttccaggtggagggaacagcaagtgccaaggctctgggacaggtgcacactggggcgcttcaagaacagcaaggaggccagagtggcagggacaaggccagagtggcagggacaaggtcagaggccagctaaccatttcgttaacacctcacagttacccttagaggtaggtgcccccattttacagacagggaaacaggctcggagaggtcagctggccctagccacacaaagcagatccagaatccaacccttgtctgctgggctctgaggcctgtgctttttgccccctgccatgtggcctcgctcaaatactttgtgcctttctagcatcactgaccacattcttcattggtttgggtcctttggggctttgcaggctgggaccctgagctgctgagctttgcatcccctctgggtcatggcgaaagacaatcttggcacatgtacggtaagcttcggggttttcacagacttgatcctgctggctcctcccagctgtcctgaggcaggtgtcaatatctccatttcattacatttcattttatttttttacatcatgctcatttttcagatgaagaaaccaaagctcacagaaagtaaagaacagacccggggccattgactcacggctgcgtagaattttggagccaggagaccccttgacgatttagctaacttttcacctttcagatgaaaaaatggaagctcacagagaagacagtggccaagggccacatggcacgtggcaggtgggcagtggctgggatccaggtctctagattcctcaccctcccctgccttttgttagtgggctagaagccacattggtgccagatgacaagctgataaagttccaagctggacagggaaggatggggaagaagagtttatttgcagtaggctcagcagcctttgttctttcatcttagaagctcagtgagtgtgggacagcgacagtaacacggaccagagtcgcagccccagccttgagatcctggtggaaagggcatgctgatggtgtttgaagtcaaccagaggtgtcattttagaccctgctcccctgctcacaccagagaaatccagggaaagcccaaggccagggaagagaggcagagaagtgcatcaaggaaaacacgggctctgaaatcacagagacctgcttttgactcttagtcccactactgagacctgcgtttgactcttagtcccactacctaattgccgggtgacctcaggcacgttaaattgcccctctgagctttagtttcctctgttcaaatgaagcaggggctgatctctcaggttacttttagctctaaaattctatgagctgagggccatgtgcaaatgtctttacctcactgcatctcattttaatctcctgcaaaatagatgaaaaaaaatagatgtggctgttcatagctcacatcaagtcagaagaggctgatttctctaaagacagcacaaagaatccacaaattgctgcctatctaaaattgggcagtgtgtatcttgtccttcctctccaacccttccctgacagataggcactgtagggcagcatctctagctaaggagatccgaaatcagcacaaagatgggcaagctcaggcttgattgctcacaggtgatattttgaagctaggcaagcttctggaggaagaaaaaaaatcaacattgtgtccccatgcgggatgggctgcaattatgcctgttctgggtggcagcgtgatgcagcagcgttcttaccaatggctggtgatccaggagatgctaccaagtgtccacaagagtttggcgaaggctgcaaacttcagcccctcctgcaaagccatggagcacactagtattttaaagacgctatgacgtcctgcagcaaaaacatgttatactttgttgatccgagtgttacccaaagcaatcttttttctttttcatttttcatttttaaggaacactagctctgtgtggaaaaaaccaaggaggaccaaatcggaagatgtggattcaaatcctattctactacttcttagccatgaggctgtgggaaagtcactcaatgtctctgcttacagtatatatatatatgtatatacacacacacaaaatatatatatacacaaaatatatatataaacaaaaatatataaacaaaaaatatatatataaaaacaaaatatatatatatttagatgcagtctcactctgttgcccaggctggagtgcaatggcgtgatcttggctcactgcaacctctgcctctcaggttcaagcgactctcctgcatcaactgcccgagtagctgggattacaggcatgcaccaccatgcccggctaggtttttttttgttgttgttgttatttttgttatttttagtggagacggggtttctccatgttggccaggctggtctcgaactcctgacctcaggcgatccacctgcctcagcctcccaaagtgctgggattatagtcatgagccaccgcacccagccgcttaccgcattttaaaatgagttaatctgttaaatgactagaactgccctgtctacatcataggagtgtatgaggatcagtggctggaatgtgggaaagcaccttatacactgtggggtgatgcgtccatgttggggaaggagatagttaatgttaggtcttggttatgcaactgagaaatgtggctacactttcattcctgctaaacagcatatttgcaaaatatgtatttgtgaaagcaccgtgtgtggagttgggggtagtctcattaccaaaagatttatctcaagcattctttaaataatgagttttcctagtgcattcagtctcagagattataaattacttgataagaaggctgatgattctgggtgggtaactggtgttcagattatcacccttgaaatgccatcagaaagtgtctaaaattatagggaaagttggtggatgattaagattccatttgtaaaaattctgtttacacacaccgatggtggaagttaggtacaaccagactgctgagtggctcatgtatatagattgtgatgtgattatagaattcaaaatcatccaaagcattactggattcatagcaattttttgttatacaatattctctcaatgaattaaaaaagcacaagagctttcatgtgggatactggctgagaaatattttgatgttaagaagacatccccattcttccaaatggtggggaacagtggtctggatcagagcttcttacagttggatgtgcacacgaatctcctggaggatcctgttgcaacacagacttgggggtgggggaaggcagagactctatgcgtctaaccagctcccaggtgatgctgatactgctggtcagaggattacactttagcaggactcccaagagaatatctacatttttgcagaacacataggcccctggtgatctggcctctacctatctttccaaccccaggtctcatccttagatacagatgcccttgcacactctgggctgttcttggcctctggtcctcattcccttccctctgctcaggacctcagctttccaggtcctcagattttcctctaactcccacacgctgcccagcaacctggcaaacaggcctgagactaaaaccaaaggtcaacttctctctaaagccttcctttagatacgcttgtcccctcccttctggaactgactatctccttctagattctcaatctatcttctatcacagcacttggtgacacttaatagttgacacgttccccaaacagactgcaaatgcttggcactccttggacactttatatgaaagttgttgggtgaatacatttccatctaccatctaaaaagagcccttcagatattccctagattataaacttcgaaaacctggactgggcccttcatctgtatcactgaggtgcctggcacacagtaggtatgcagttgagattcactaaattggggacatgaggtctgaggttggggctgtctcatctgcttcctagctgttctcctcagacccttgcaccagctgggagttttaactagaacacacgtattttctgcatcacacttagcatgtgcattacgcacatctttccagaatgaaaaaagtcaggctgcttctcatgctaaatggatacctgcctccagtggtgtttctgatttatggcatcatttctttagagtcctcggacacctgtggagtccctgtgtccagcacagaggcccactctgagagtgagcctaacatcccagctggctgctgtaggttcctgtgccctggacactcggaactcaggccagagcctgctcctctcattctggggagctccttaggacctggcaccatgacaagaggttttcctgggagcagagatgtcggagaaaccatagcaaccatcatcacccacgcttgttctgccccatttgtaaagggggataagaaacgtgctacccgtgatagctgctcaggccttccagctatgctaaaaatttatgatgattttaaatttaattattatttttatcaaagcaatatatgtacataatttaaaaatcaagtggtattgcaaggcttctaatgaaaaccagcagtttcctgctccacctcttcctacccccgagtcctacttctcagaagcaacaactttcaactgttttagctgtttcttctggtatttactttcatatttccatgaatgtcaactgcttgagatttatttcttggttttaaaaaattttagatcctgtctacccaatttctaccatgtaggaatcatctacaatcatattatattatctgcacaattcctacctaatcacagaagatgaggatgtaggcttcttagatgatgtgttccacgatgctgcctttcctttcaccctccaaatatagtgatatgatattttggttaaatcagtatccagcttttacataaccatgactctgtaaatattgtgcacagcccagccttgcagtatataatgtttttgatctctctcttgcgaaataaatattttgtttttcctgtttttttttccattttgttttgttttaccttgctttttccttgttggtttgtatggcttgctagtacccatcactagaaatcccagactctatggcagagctgtaaaatgcctctcaggacagccagacagacccacaagggccatcccttgtggatccaacatcttcctgctccagtttggatggaatgctctccaggcctcctgtgcaactgttgtcctggttcttctcttcatcctcatcaggaaattctcttaggccagatccttgtctctggaatcttatgcaatccttgatttaccttctcattctccaataacttcctgaaaaagtctacattttttgggaaaccaaattctactctcacacttcatttgtagtttgctggatatagaattctattcagaaaagaaagcgtccccctccagaaactggaaaacattttgccattgtcactttgctttggctgcttctgttgagaagtcctaggtcgttctcattccggatcccaggtatgtgactatttttctctccagaaactttaaagatttttttctttatttctgttagcctgaatttcaccaggatgtgtcttggtctggttttttgtttttgacgctattgcagacaggagttggtgagctttttccatctggacaatcatgtagttcagttgaggatttttgttatattagtcctttgacagtgtcctcttctccatcctcttggttttattactctaaaactcctagtaataggatgttctagaatagcttcctggatggaccctctgattttcttatttttctctcactttctacctgtttgtctttttgtttaaccttttcgggagatgttctcagttccaatccttctatggattaaaaaaagtttgcaatcacatt[132 bp omitted]tctcctgcctcagcctcccgagtagctggggctacaggcgcccaccaccacgcccggctaattttttgtattttcagtagagacagggtttcaccatgttcgccaggatggtcttgatctcctgacctcgtgatccgcccgccttggcctcccaaagtgctggtattacaggcctgagccacagcacccggccacatattttaagtttaatttattcttctctgaaatttcctttttaatagcatcctatgcttgtggttatggaggcagtatcatctcttatctctcttgagaattttaattaacgtgttttgatgttttctcctgcttccttcatttattttttatttatcaaaaggcgtatatggtgtctaatattatccaggcacttttctaagcacttcataaatattaacgcacttcaatcctcccaacaaccctataaatgtagataatattattattttcattttagaggtaacacaggtcacacagatggtgttacagctgggatttgaacccaagcagcctggctctatatcttgtgctgttagccaatgtgtctatttcctcaatgtttctttttggtttgatttgtgttcattgccttttagtgggtcccctcaaatgcttggctctttggtggctcattcaggggtaaaaggtccttaaaggcttccttgtgttgagggggcactcctcaagggacttcattctagggtgacctaactaggccttttaaggcttcctgactgtcattatctgtggatcttttatcttgagcttgtagtctccaggaagggatcccctcaaacttctgctcaggtgtgggtggggtaaattagtctggctgagggtcccactactcaggaagtagaatttccctcacctccctgtttttctgcatagcacctcacccatgccctcagctgtgcctgatctctccaagtcccgagtttgtaagagggatatttgtatggctgcttctggccatgggaggatgtgtggggggcctaatagttccttttgtagacttttaactcttcctcctggttttacctccacctctcaaacctgtcttcagcagtatcttatgcctctaattcccgatcctgtctgggggttctcaaatgatgtctattggcctttgctggcttcctcagtgcaggccctcagttctcagcctcgtgtaatctgccaagtcgattgccactcgtccatctactttacatcttccaaaaattggctggcatctatttacggttgtcttttctcccatcctctttgtcctttgggtttatacttacatatataaaaaaaacccttcgattgccatttaggtggggtctaggaagggggcctcccataaacacatatgttcaacctaccatgtttaatcagaagcctagaatgtcagcttccctgcagttctggtgtgctgcagaaaggtcatgagcttctttcaccaccccaggaaaagggagagggatgcttcaagttggtctctgggatggacacagccatggaaccaaccagcacttttaatcccaatgacatctgcctcccatccagtggttttcaaacagggcatcctcagtggtgcctcagggttggtcacagggaccaagggagaaagcaaacgggggtttccatctccagtgggatcagagccatgttgcttttgtctgttttctacgtgggactgcgctaaagctttcattcagtataatgattctgctcctgaagaagaaaagaggaaaaaatagacaaggaggatggcagcagacctatcattatatgccattctctcttcagagatgctgcctaaacctctttccctgtgctattttcatggcagggcttttatgaccacattgtgaacattaaaggaatttagtggagggagcatcccttttgggtgtggatgtgggttttaagcttggttcaactgcttaactaggtatgtacccttgggaagcttacaacctctctgggctctgtgtcctcatcctacaatgaggattctaataccttgttagcaagtgattgggaaggttcatggcacagagtagctactcactaatgcaggcttctccctcaccctggccctggcagtgtacacaatttcagcattgtgtttcctctcaacaaatatgtagtgtcctgatatacatctgtgagccagacagtccaaggtctctgacttcctgggacttgtgtttagtggaaggggcagacaataaaaaacaataaggaaatgaaggtgatatagtttggctttgtccccacccaaatctcatattgaactgtagctcccataatccccacgtgtcaaggaagagacccagtgggaggcaactgaatcatgggggtaggttttactgtgctgttgttgtgatagtgaataagtctcatgagatctgacggtttcatgaaggggagttcccctgcacacactctcttgcctgctgccatgtaagatgtgcctttgctcctccttcaccttctgccatgattgtgaggcctctccagctatgtggaactgtgagtccattaaccttctttttatttatgaattacccagtcttggttatttcttcatagcagtatgaaaatggactaatacagtaaataggtaccagtaaagtgggatattgctatgaagatacttgaaaatgtggaaaacactttggaactgggtaacaggcagcagttggacaagtttggagggctcagaagaagacacgaaaatgtgggaaagtatggaactttctagagacttgaagggctcagaagacaggaagatgggggaagtttggaaattcctagagactcatcaaatggctttgaccaaaatgctgacagtgacatggacaatgaagtccaggctgaggtggtctcagatggagatgaggaacttgttgaaagctggagcaaaggtcactcttgctaggctttagcaaagagactggtggtattttgtccccaccctagagatctgtggaactttgaacttgagagagacgatttagagtatctggtggaagaaatttctaagcagcaaagcattcaaagatgagggatgaagagtaggggtgagggtggcaattttaaacagggtagtcaggggagacctcattgagaaggtaatatctgagtgaagagttgatgcagggaggcagtgagtcatgtggatatgtgagcaaggagaattctcatagcggttaatagcaaatgcagatgccccaaagtgagggtgttcctggaatattcaagaagcagcagggaagcctgtgtgactagagccaggttaacaaggtgaggggagggcaataggagctgaggaagctggagggatactggggtccaaatctttaccccgagaacagcatagctttaaaaaatcattcctttgctcaaaagcatacttgacatattatcatgttaacactaattaacactaggatttggggaaatcagggcagattgtatttgataaaaaagtgtttttcattggagtgcatgaaggatagaaggagatgtgaaagggaggtgcctatttgtggtctttctgacactcgaacccttttagaatttgttagaaaactccctgtacacggattccggtttcctcagacgtaacccaccctcaattctcaccctcacccccactcactcagtgtggccatccacagggctgtctgtctagcagttctcttgggagtgccttctgcaaccaccatcggcccaacttctttaggactattacagggtctcaggtgaactaattcccctgcccactgctgattggtccaggggcgggcacctgactggagctgagccaatgattcccttccctgtattttttttttcccctaaacaggacgtctgtgagagtcaaaacagtcttttgctgggggcaggatctgtaaaatataaaacttaggctctgttaggagccatgtgtgaaaaaatatgtgtgtgggaaaaataagcctgtttctagtgacagaatgaaaagaattcagagggaggaggagtgagagatctgaggatttaggagccttgggttccactcattcctgaggctgtatccctgcccctcctgctggctggttgtcgaagcttgccttggattctgagaacaatataatttcttttatgcctaagcttgtttgattcaggtttctcatgtgcaacctagataacccaccgcctattccttttatctttgaagttacttagaggtatctacacagaatttcatttttaacaacctccctttctgccttcaatttaatttccgttggaaaaccctggccatgaaatctgcacttctacagtctaggacagctttttcaaaactatattctgtgagcttttccatgaaaacgaaggtttctgtggtcaaaggcatttgggaaataaatgctgccttggctattcctatcttggagattcatgatgtattatattaaagaattcctgcaatgaataaatgtgtttaatattttttaaccagaattccctaaattctttttgggccctgcatcctttttgttcataaacatgttatatcccaaactcctgatgttccatagggctcgttttggggcatactctctaggaccacatgcaactgaacctcttcctttaaaatggcatattatcacggtgccccacatgaagatgtgtgaccaaggggagcaccttggtgtggggcattgtctgcctggaggaagggacatttttgataattttcatagagtcattgtctactcactaaccatgagcccatagggctgggtctacccaaagagggtgtcttttgttaacttactccttggtgtcctctgtgttgatggtggtcaacaccatcaccacctccccaaaaggtccttcctgttagttagaattatccccagaagagtggttccctccctgcttcctgacattcctgagaagtggagccatccacaaggcaaggcaaaagtgttccagaggctctgctttgagcagaatgggagttccagatgttgaggtgctgcagagctctgtcttaggtgtgggatatttggaataatctctgcttctggagtgttttttttgaccatcttcccacctgctggtgggcatgatcaccctctcattgcttacagtttgcagagaactctcgtttgagcccttcagccctcctgtaaagccagtgggttttatttgtctctattttacaaacgaggaaacagaggctcactcacttggcctgagtcacgcagttaggaaaggaagagctgggatggggtcttgggtctgcttgacctggtcatgccattttctctgtcttcctacactgcctccatcattaaactgcctgggcacacatcaaactgccacgggcacatttcaattcctttcctctccatcaccacccaaatatctcctggactcctgggcctggcctccttcctctggggattgagaggtgggaatgttaaggaagggagatggcatctgtggggccgcatggtttggcagggcaggaaggctgcctcctgatgactgtggcagggataggcctggctgtgtccatcatcctcgggatcaatgaccaagcagccacgtgtgtctgcgcctcctcaggtggctttacagacaagcatctctcacctgcgagagcccacctcccatccttcaacagatgtgttggcttctctctcacccgcatgggactcacctcccactggcctaggaaataagcagctttgaggtgaccagcatctgcaagaggcagcacattgctcagggccttctcagcctgaagaaaggtacgatggagggagccctaatgcaggaattcaagggtctggctgaggggtctgggggaagtgacaaaacctcagcctccttttctggaaaatggggacaaggagttctgcctgacactcaaggtcatggtgaggggattgccaggaatatggaatagtatgacccgaggaatatgggaggtggctgcaaaagccaaaatccatgaagtcaaccagagttgtcagaagctgttttcaaatatactaactgctctccaatatggtagccactagccccctgcagctagctaatttaaatgaataaaaatgaaactgtattaaaaattcaattcctctgcaaagacataaggatgatacaatggactttggggatttggggaaaagggtgggtgtgggtgaggcataaaagactacacattgggtacagtgtacactgcttgggtgatgggtgcaataaaatctcagaaatcaccactaaagaacttattcatgtaagcaaacaccacctgttcccccaaaatctattgaaattataaaaaagttcaattcctcattctcctagccaccttgcaaacacttgattgccacaaggggttagtgactaatgtattggacagagcagacagacaacattttcatcagcccagaagggtctataggacagcactgatcagatttttctctaacctgtttcttctgccccatccatcccctgcccctgctttaaacccgttcttcatacagcctgcttccccaactccccagtctcaaaggaaatcgtctaagtgagtgtgctggtccatctcccagggatgactcaaactctcagcagcaacgagactggagttctcttgcagaaactgtgtgcacatctggcaccccgagtgagataataagatcctgaaagatggggtcttttctcatgcctcctgcacccctgatgatgacctgcgcagtgttagcatgtgacaagtccttaatcaagattatgaattttctctgaattggtatagctcatcatccagtcaggttgactgagggtccaaaaacttgggtcagaacagtcttggttcagctatgaactcactgcatgacttcaaagacatcattacttcaagccaggcctcaggggaaagagaaggttggcctggaagagatgacctcagaggttctttcctgctctgaccatctgtggctttgaggcagaacacagactttttgggtagccttgtagactgcagccagtgctcagaccaaggccatatcccacagggaactgtgctgtgtgaggatgtctgtgatgggggtctggtactgagagtgcatgtgtgtgtctgtgtgtgtgtgtgtgtgtgtgtacatgtgcttttgctcctgaatcaagataacaggctaggaaagctaccattgtcatggagggacataactaacttctgtttaggctttgagtgtggggtctccatgactcattttatttccttatttctctcttctaccacacagattagattaatcatataagttctggtgtctgcaagaagggcctctctttggggaccaagactccaccccctggactccgggttgtctacaggcccccacggtcccagggcctggttggcctcaggatgccctgtccaccagccctcagggatgccagagatcagaacggacacaaaccttcgtccctctgcatctggaagggcattgagttgagaaaagtacacaggatcaacaaagtgtctcctcagagagtggctgatggggctcggggtgccctggcgcctgaggtgagcttccagatggcactggcgcagtgacatgtgtgtggccattttatctttcagttggaggagcagaggactggctgtgatgggaggtaaatggccacactcccgtccctgcaacggggtgttcgtgagagaggggtggtgggagagatcctggagtttgcagtcagtcctcctggggtggaagccctcgctgtctcagcagcctggtaagcctgggtatggtgagtgccagactctagagtccaaagtcaatggactcaaggcacaggggtggcaacaggtaggggctgggctactggggctccaccctttcctcagccccaacctgagggcccagggcctccctcctgctggaatcttccctcccctcccactcccctgcaggctgctccccacgctcctctcttgacccacctctgcagtccttcctgttatgccctgaacgcagcattaatcttactttgggtcccccttaaatccatggttcccagtcttgggcacctctttaccttctcttcctggtgaaattctagaggctaccatcactccttggcttgtggctgtatcactccagtctttgcctccgtcatcacactgccttctcttctgtctgaccttcctgagcccctcttatgaagacttctgtgattacatcaggcccatctggatgatccaagaccatctcaagaccctgctcaaatacccttggtgctttccctgaccctgttccctgtgattgtgtctcttcctctgggccgtgatcaaggacttgatctttttcaccataatgtccttacttgggtgcaaagcctgagatagtatacatggtttacgaatagtttgctgaagaaataaatgaataaatgaatgcatgaaataagctttagggtctatacacatgggtctcccaggggcttacataggcacaggcaaggtgccaggtccctgaacccacatcctttggtattccaacacttcccagcccctccagcttcccccagtgggcggcagcctgctttcctttcagatcttctaattgggtcgggatattcaggatgactgagagagaaagaggctgatccatccttcccgcctctcctgaaatcaagccactcacctgaccaaccacacctgttacttcaaaccttcccccatgccttccttccccctacctaccttacctctccagtattcccatcctctgtccctctctcacatagtaaaaggtgaggaaacccagggcatcccagcccaagccagggacatctttatgatctagcagcatgtcacaaaccccttgctggagagcagtccctcacagggtgggccaagacagctcaccagcctttcagagtcaggcctgcaaccctccaccatcacccaatgcccggtccctgtgcccagctcacctgtctctccccagatgggcaggtactcatcctgctgaatgtccagcatgatctccagcccgttgcctgtcccccccttgaccgtggtgagcagaggtttgccatcctcgcctgagttaaacatgtaacacttcccatattttgtaaacacctgaaggagagaagagagagagagagagaagcacatgggtaacttcagacgggggtccagagattggcgagaccccagaaatctgacagcaggtcagagtccccacagcccatcaccatcaccgctctcaggaaccagtggtttttcatcctggctgtgggcctgacttgtaccaagtgaaattttggcatcaaagagcaaatctggatgccctttggggtttgttgcagtaggatctggtctcttcttcctctgagcactacctctgggaggtcctgttcacttccaggcattaaatgtcatctgtaaactcctgacccttcagtccacacctccagccctgggctctcttctggcctccagacacactagtttcactcattgtcttataagcatacctttgagatgtgcttcaagcagaccctgggcactcagcttgtccagagggaactgatcttccttagcttccccaccccattggacaattctcttgcacttctgtcccagggaacagcatcgccatctgccaaggggttcaagtcaggccctcagagttgctgcccactcctgacccagaggaccaatcaggcagcagagcctatcaataacctctctacatctgtcctgaatttagccttttgtcttccttactgctgaaatttaggacccaagcgttttttgactgcatcactctggtttcctagctggacttcaggattccagatgaccttctccagcccatcctctaaggtaactgtgagtcattctggaatgcaaaccctatcacattaatcctgtgctgaaaacccattagagatccctacgctctttaggctagaattcagacctgccacacccagtcttttgcaatgccctccacctattcctcctgcctttcactgtgctgcttcccgcctgagtccagcagcatccactggaaggtagactccaggggctcagtgactacgtctgcttactcatgcttagtacattgctggcacacaatagggctcagtcaacttttgcttgatgaaagtatgattacaaagaggccccgtgatggtgtagaaaaagcccagggaaaggaatgcagagatctttgtccaagttttgacattgccacttcttagtagtgtgactttaagtgaaccaaataaaacctcgcagcctcaatgtctccatctataaaatgggggttctggtctttggctttgctacctctcaaggttattgagaggatcaaatgaggtaatgcatgcaaaagtgctttaaaactgcaaaagctttctacaaatgctacgggttatgatgattatataactgctttcaaacctcgagctgaagccaaattacatctggcaaaattggctggaagagagccaggctgactgtattggattcctgcagccacagagatttgggtctgggccactttcctgagcatgctccactgcactgtcccatcctacagcatggaggccacagggaggctctttggcttcccagctttcagtgcacaggcaagtaaataacagaggtgactgttgcaggctgcctttcttatgtaaatctttacggctagttagaagaaaggaagaggggcttctaccctgtgccaggaactgtgctagatgcttatctgttatctcatttaactcttacaactgtgaccgttggcagttattgctttacctattgtgcggaggaggaaaccaaggcccagagaggttaagtgacttgcctaaggtcacacagctagtagcagaaaaactgagattcaaatctacatctgtctgattctaacacatgtgccctttctgctgtgctgtcctgggagggacatgagggttttcgtcattgggacacttcctagccacatactgctcctttctgccttgcttttctcatcagtccatcaatattcatatgcatatattcctactatgtgcaaggattatggggactgcaaaaaagtacaagctctactgctcgccttgaagacctgtaggaaggggtagtgaaacatctatgtttttcctcactatacgaaacagctctgagtccctggccagctgcactatttcaggacagccaattcctattctttcagcttcatggcagaggagaacagctggaattaatgcaaagtccaaagcaaatatgctttttcaaagaaccaagttttttcataactattgcatatagcaattgaacttggcaaatgaacttatcccatggagacgtgttcttggggatcactgtaatgaacagataagagcatttcataagcacatccattgcaaggcattgaacacacctggagtgaattctggggtgctccaatagagcttttctttgtagacactctaaatatcctctctgtctcttcaaaattgcttaaaatattaatttgcctatctgtatgaagggatttgcaagcaaaagtaaatttcagcttagcatcagattattgcaaattccaactccttcaccttttagtccctgaacttcagaatactgggctggggttagagagtagtgtggactcctgaaatcagctgtgatcttggccctgccaaagcatgcccagtgccattggtgaaggtgttgaccctccctaagcaactgaagatgatgacaaggtgtaagaattgaaaagggtcttagagatcatcttgttaatccaccttactttacatattaggaaacagagtcccaggagagaggaaatgacttgctaaaggttacacagcaagaaagtgtccaactgggaccctttccttcctttataccagcctctctcagtttttccacttacaaaaagaggtggagggtctagcggggtgctaagatccccccatctctgaacttcaattgatcattgactgagtgtctgctttgagcagatacagtgggaatggaagcctcatgaattgaaggctttccctgtcaaagagggagcagagaggtctttatagtgggagtgagtagagacttgttccccatccttgactgcctccttgctagggctggtacccatcctagcccaggtagcagctcctgcagctgcccttggtgtcaatgtaatctttcctgctccttcttctgggggcagtgtgctggggcaagttcacaaacgtgccaggtgtgagctgacatagcttagagcttggtcaagggtggcggtcaccagagtagcaggggtggggagccagagggagactgaagccaaatcagagaggtggccaagtgacaatctatgacagctaaattttttatcaagtcaagaccaccagcagaggcctaaaatccttgtgtgacttcctgttgcatttaggatgaagcccccagtccccactggggccctgtatggttgagcccctgacacactttctccctgctctcacaggcttcaaacatactggcctcttcagtccccaggatgtgcagcaagctcttccccgccaggcatttccgcatgcctagagtgttctctgcctagaatgttctggcgcgctttgcctggccagctcctcctgatcaggcctcagcttgaaagccactttctcagagaggtgcttggcttctccaggctctcagccttcattcatatcgggacttcttgttttacaacctcacatcccttatatttttccattatagtgtctatcaaagtgtgtaactggatggttatttacatgattatttgttggatgtgttttctaccagactgtcaccttcgagagggcaggaactgtgtctgttttattgaatgaatgagtgaatgaatgaatgaatgagagtcaaggtgctgctgccacacatttccttgtgcacctccaggaaatgccctttctgtgttggctggcctcacttcgttctggctggagctcatgctgacatcttgcccagctccccttccctcccattctctgctggagccttctcacttcccacctaattggacctaagcgtttttgcttgcatctccatgaaggcattagaggaaataatccttttaggaactaagatgactggggacagtttaccttcctaggtgctggcggagaggctcacggaaagcgaaacgcccgctccctggctgcatgcctttgctggtctctccgcctgggctgctgagcctcccgctcctgcctggcttttttcagaggattattttcctctctgctaaacatcaaaagccagagagctatttacacacagcgcaattttgctacaaacttggaacaagatgcagctctttctgcattttggggcaccatgacgtgtaagaacacacgcttcaaatttatgccttatcgcccccagccagaaaatataatttatttaagtccagactgtcaggttgagctcactgcttcttcagacctgctattctgccaggcatttctctgctttcctggtaagtgctgacaggcccactgtggatggcagggctgcatttgccgggttgctgagagtctagaattgcacttagttggattggtctgtaagaattaattatgaattaagaaagatgcatgtttcaaacctggatctccaggaatggtggggggtgggggctcctgagataaaaataagtcccacaactatcattttcattcctaatgcttgcacagtgtgttactgtttagagattgagattgcatatacatagaacttcaactttctcaatggccctttgaagatggaggaaaggaaactaacaattccttagcttctactttgtgctgaccccagattggcacagtcatagttttatataatttttttttttttgagacagggccttgctttgtcacccaggctggaatgcagtggcacgatcacaactcactgtaatctcaaactcctgggctcaagcaatcctctcacctcagcctcttgagtagctaggactacaggtgctcaccaccatgtctggctaattttaaacattttctttgtggagatgagggtttcactatgttgcccaggatggtcttgaactcctgggctcaagcaatcatcccaccttggcttcctaaagcagtgggattacaggcatgagccacagtgcctgacctcattcctcattcttcttcctcttcttctttttttttgagacagagtctcactttgtcacccaggctggagttcagtggcatgatctcggctcactacaacctctgcctcctggggtcgagcgattctcttgcctgagcctcctgagtagtagctgggattacgggcatgcaccaccatgcccgcctaatgtttgtatttttagtagagacaaggtttcaccatgttggccaggctggtctcaaactcctgacctcaagggatccatctgcctcagcctcccaaagtgctgggattacaggcatgagccactgcacctggccctcctcattcttgattattgtcccaaccacccggaagtagaggcattttatattcacatccagaaatggagaatctgaggctgcttaaggccacagtgccaaggggtagcagagctgagactcatgggtgagaccttcccatcagagacattgaaaggaagggacagtaggctaaaggcagctcactgacagctagtcaagtctgtggtcattctcaattccagtgttctcttttgcaaactgggcaaggtaatcatgccatgtagtagatttgtttgggaggttacataatggacatctttacttctatactcgaaggaagtactatgtgtctgcttttcggcagaagagagatgagttatttaagttatgaagacggggtcagagattaattgaaaaatgggggtttgggggttcctgtgctctctgcttatgtccacacaataccaagctcatcttaaagtagttagaggggaagaaaacagccacatgcccctgcttgtctattctctgatgatgttaagcctgctgctggaagcccagggtagccaatgggattcctgggggccaaggagttctgtagaaagggagatgcttccatgcacacagcccactttgaaaatctacatatgagttccagcagctgaattgtaactagctattgatacagtggataccaccaatctgaagttgacacattctaaatcagataaacatagaataaagtgtagaataaggagagagtctcattggtcctccagtaactcttcaagtagctctgaaatcacaggctggctttgctgccctccctggagtgccttcagtgctagccactttatatctgctatcgttaacttttgcaacagctctgtgaagataatattatcatccccattttacagataaggaaactgaggcacagaaaggctgagccaggtcacagagctggaggagccagggtgaaatcactcttggcctaattccaaagtctatactctttgaccccatccctcatagccacggctcatatccttacccctctcccagcctactttgttcctggcagactagtgaggctggtgctttgctgacattagagctctcccacctggtagtgggggaggcacatctcagagtcagaggaacccgagcaaagtgccagacaccaaaaatcttcgcctccaaacttcttattttgcacctggggagtctaaggttcagaggggtgaaatgacttgtcccaggtcacgcagctaatctggagggagagtagagatctgacctgggcttcatgtcttgaacctctgcttttcctcgaagccttctgtttgcacatgccagggcttggaaataatggctaggatccttttcctggagcattgcatccaggcataagagtaagattggcagctgctgccaagcctagatgccagcctctgggcttggtgtgatctgctggggtattccgccttacagagtttgggaaatgcaaagtggagcccttactgagaggagttaggagtagctaatacccatgaagacacggttttctggtccaattaatagtgcaaacaacatttctacgctgtgtacctacttaagaaaataaattatgtataagcccccttaaggactgttgaaacatccacttaccagcacacagctggtcctgcaagcatcaaaccttctaacctattcattaatcctgacctttagggcttcttctgggtgatgggtttctcatctcttcttgcttattacacgtgaaggaaatgaaattgcactgctccaaaatgcctctaaaacttagctgttttttctcttccctgagtcaattccgctttcttctcagtgagctactgaaatttctcattagactgttttcaaaataatatgcttgttaaagctagccatttagttttgttttgtttttctctttcaaactcctcaaatacatttcacacaattgggaagtgagaaagtctgtcaaatgggttaccaggcttccagtaaacaaaatgaacctggctcttgttttctgaagttgcaattaaggagcttgtcaattaaatgaagccagagggatttattagcaaggaagctgctgtagatggttagctctttgaaggtaaagactggatcttattaaaaaacctgcttgctcattcacctgttcctgaaacaggaattttttgaccacctatcatgttctaagaagtgctgcatggctgtgctttttctcacaatgagtttaaaaaagtgatttcaataaacactcatgtaagcatctccatgtggcaggtgctgtttctgaaaataaaggagatgaggcgaatgtgaccgcaatgcagcccctttgcccttcccaatcaggaggccacatgtttttcaggacatcattaatgtcattctccttagaggctactttttctggggagaaagggaaggataagcaatcatgtggagcatgagtgggcactgtgctgattgctttgaacgctccgtctgttaaggctcacaaagctcttggaagtagatgttattcttcccagcttacagcgagaagactgaggctctgagaggctgcatacctagcccaaggtcctacagctaaagagtagtttgcctgatttttcccttcttatgtaggggttgctggaataaggtttagcattatttgaatgtatgatatggtaacgtgacccccttctccatgccctggggcccatctgctgtgatgtgacatttcctgtgctgctttcactaactggcagagaccttctagtctcctgcttccaagactgaagcacagccggggccttttctgctgggcagctgtccagagagcttcagaccgtgcaggaagagatgtgtgaatgctatgcaggaaaaagagcatcaagcgcctgcaaatctgtctgttggttgggaaaacaacacgaaggggaacaacaggcaaatcttagtgttctccttcaattgtgtggacaaatgtgttctcctggcagatgacacagaggcagaggggaaggctgaaggcactgcagtcgttcacctggaaaggcattcaagatgctgggcctctgctgctgcatccctcctgacaactcatctgagaatcccaaatttggtctgacttgagatgatgaagtggaaggtggggaaaccagagcctttcatgttggaccacagcttggctggttgggggaagaaggttgacaggcatttctgggtttgatggaaatttcaaatgggacacaatgacaggttgcttgctctttcttctgaggtctctactgtctgtctcctgtagatagtaggggttgtgtcattttcatctctgtgttcccagggcctggcctggtagctggtgtacagaaggcacttaatgggaggtttgggtgaaggaaaaaaagctaatatggaattggggaccaggcagccctggtttcaaatcctggctctgccactgatttgggtatctttttggttcttcatctttttggttcttgaacgtgcatctcagcaatgctggtaagaataccttccagtggagctgttgtaaagatcaaaaggggtataatgggcctgaaagttctctgtagaaaaacaaaaaggctccgcccaggcagggagtattcctgcttatggcttggatcgtgcataagccctgcaggagctagggaggaagagagttgctatttggctgtggatgttgaatctcagatgttgttccatccgggaccatgcctgtggatctcttgttcatttacttagtgagcatctctagaacacctcttgtattccaggaaccacatcaggccttggggatacagacatgagccaccctttaggaatcacccagtggggagggtggcctgcagacaggtactgggtggtgccaggcactgtgggagtgcacagaaggaagctgcctggtgggcagtgatggggggatggtggttttcggggcatggagaagtgttgtgaaatttcccctagggacagtggtggcgacagcagtggtatttagcaggttgagacagatcccctagactggctccttgtcttagcagggccatgctaatgctttcagaaaggccagtggtgccagtccatgcttctggctacctgctgagccctgcctatctgctcatcattccagctgtcttccacactggaacctcacaccctcaggtagacaactatgggctctactaagaggcgggcagaactgtagaagaacactgaccgtggagtcagattatgctggctgcatacctactacatgccaggcactgtgcacaatgaataatggagcttagctttcacagagtggataattattaagacagagatgcagtgactgagaggagttagcatttgattctccccaagagaacctgtcagcctcagagatctccccaaggctggctctctgatctgcccactgccaacacatcaccagaccacacctaggagcatacggccaagacaagtagattaaataagaggaagcacatttgtagtgagccaaggctgactgtgatgagcacccacttggctgccaccagatgtaggaagcagaacccaggaggagttccctgcttttaggagggcaagaacccaggaaagagtgagggagaatgtgtggccacaaaccatccacagtctgctcccattcccatctctgttgtccctactgcctatttccaaccctactggcatgcttcctgcagcccttcctgttccagttcccaggcacagcagactggagtcaggggtgctcacggtacagcagcccagacactctgggatgtggctccgaggctgccacgttcggtggagcacatcttagtctacgttcgatcacccatgacatgatggatttgaagtgcctagcagagggtactcacttgataaaactagctaataatattattattaatagggattctgcacctgaactctgatatctgagctcctataggatgtgatttctgggctcatggttcctgttagaagtttctttttaatatttgatgttttttggttttgttttttaattgacgcatttatgaggtataacatgatgtttcaatacatgtatacattgtgcaatgatcaaatcaggctaattaacatttctactacctcacatacttatcatgtctttgtagtttaaatattctaaatggagaacatttgaaatcccctcttttagcaagtttgaaatatacactcttattaactatagtcaccatgctgtgcaacagaataccaggactcgttcctcctgtctaactgaaactttgcaccctttgatcaacatctccccattccctgtccatccccctgcactgccccagcctctggtaaccagcagtacaaatgaccaacagatatataaaaaatgcccaacatcacaaatcatcggagacatgcaaattaaagccacaaggagatatcacctctcatctgttacagtggccactaccgaaaagatgaaagataacaagtattggtgaagacgtagagaaaagggaacatgtgtacactgttggtgggaatgtaaattagtacactcatttcagaaaacagtatggcatgtcctcaaaaaaccaaaaatagaattaccatatgatccagtaatcccacttttgggtttatagctaaaggaattaaaatcaatatgctgaagagatgtctgcactcccactttccttgaagcactatttacaatagccaagattctgaaacaaccagagcacccatcaatgggtacatgaactttaaaaggtggtatagatacgcaatgaaatactattcagcctttaaaaagaaggcagttctgtcatttgcaacaacatagataaatctagataaataagacattatgctaagtgaaatacgccaggcacagaaagagaaataccacatgatctcacttatatatgtggaatctaaaaaaattgaactcagagatagtagaatggtggttgccattaaaagctttttttttaaacagttgcttgcctaatcttgtgattacaaccctattcttgcttctaactgctgcatgctgaatttacgggaatacctgcctgcttggttttcctgtggctgtgcccagatcccttctggaacgtttcttgggcattcttgcaaaactctgcattactctgactggctatttctgctcaggtgaacttcgctttccccgcgccttcccagctcctatcccatgggcttgggtgggctaattcctactgctgtgagtgtgctttatgcctggatgaacaaccctgagatcagacacatgtcactccttgcacctgcctcattacacacctgctgggaatatcccttctttcgtgcaggtgtggaatgggagaaggaagaagaggggatcagaagtgtgttgtgttgtgttcctggttaattttgcgttattctacagggctgcattgaaagcgatgcaccagtggaaaccaaatgatagtttatgatgtttacagaagaaaagcacatgtttccattaatggcagggcagaaaacaatcccaaggcaggctgattctaaaagctgatcaagaaaaggtcaaataggtaacgacccatatggcactaaaatcctcataccacattcttactgagttcatgttttcttattaaagtcatatttcagcttttccaggaactgctcggagaatgtcattgtctgctagttttccccacagctggtcttggagattgagtatcatggaattttagtagcaaagcttacattatgagtgttcaaagccatcacagattcacaaatgcagagagttttctatagtttaatcagattgctttcctgacatgtgaaattagggcctggctgggagatacacagcatgcatgatgccactctcctttctagatctgtaacagacataattgattgatcacaatgctctttccctctgggactcacaattgttttcagcccaataattttggctgccactatgggtcctttggagttggcaagttagataaacactatttgccatttttgcaccagaagcatatgagtgctactggtggtgccagtgtctctgtagtaaaaagcaatgcctgaaagtggggaagggtttgagcaggtgccacagggcagtggtccccaacctttttggcaccagggactggtttcatgggagacaatttttacatggactggggagaagggggcgatggtttcgggatgattcaagcacatgacatttgttgtgcactttatttctattattattacattttaaaatataaagaaataattaggtaactcaccataatgtagaatcagtgggagccctgagtttgttttcctgcaactagacagtcctatctgggggtgatgggagacagtgacagatcatcaggtattagattctcttaaggggggcacaacctagatccctcacatgcacagttcacaatagggttcacgctcctgtgagaatctaatgctgctactgatctgagaggaggctgagtcaggcagtaatgcaagcaatggggagtggctgtaaacacagatgaagcttggctggcttgcccgccgctgacctcctgctctgtggcccagttcccaacaagctgggttggtaacagtctgtggcctgggggttggggacccttgccacagggcaatatgagggtcacaacttgagggcttgggtagaagggactcatgagtgacagaggcagaggtggtatcttgcatatttgacaaatatttcttagacttggcccctgtaccatagaagagagagcataggctttggaatcaaagcatgagtttgccacttactagctttttaagttgggctaatatttattcagtatcctcatgccttactgtctcatcctgggagactagaatcccaggggagtgtggttttcattgtgccacagttccttgaattatgaactaaatatcaaaggacctaagatgattagaggctttcacaatgaaagacaaaacatttttagttcattcaacatctaatgagcaactattacatgtcaaacaccgtgctaggtcctgggaatacaaagataaataagacatggacaccaacctcaggtagttcatgagctataagaaatgaagataaaatagcttaagatcatcagggagataaagcagctgtaatatcatcatggattcatgcacattaacttacagaatgcaactcttcagcgtaattgcataaagcaaggtccacctgttccagcctattgttcttgtcgagctgtgggcattcaagggcctgttttctgctactgctttcacatcagttcaccctacagccttatctttcctgtcctcttcacacccctacctcccctctagatccctggaacaggaccaggactaggatggggcaaatgaagacctagggcatgaaatttaaggaagcaattatttcgggggttgcacttgcattaacctgagtgtgggtgcctccttaaattttgcgtcttagtccagctcctgctcaggacaaagtcagatgaaaacaggaggagagacagatgtgatgaaagggagtgacaacttgttctcacaacaaacttgcaaaatagacactattgtcccatttacagatgaggaaattggggttcagggaaggtgagttacttgcagaggcatcacggactcgtgaagtgcaagcaggaagagagaaagagcacaggcttttttactgagatggatccaagtgtgaagcccagttctatggggcctgagtcatgtgaccttgggtcagttacttgttttctctgacctgtttcctcatctgaagaatgtggataataatccttctcagggttacatggaaacgaagtccagtctcctccactttggtctctgtgactctactttttcatgtgtcgaatggcctggccacacctgcctcacagagttgccagggagaccatgagttctgaggggttgtctgaaggatcaaatgtcagttctagccaggcatggctcacgcctataatcccagcactttgggaggctgaggtggggagatcacttagggtcaggagttcaagaccagcctggacaagatggcgagatcccatctccactaaaaatacaaaaaattagctggatgtggtggtgtgcaccagtagtcccagctacttaggaggctgaggcaggagaatcgcttgaaccggggagatggaggttgccgtgagccaagattgcaccactgcactccagcctggtgacagagcaagactgctgcaaatcttttccagaaggataattgagacttatgccacatgtcaggcgaacctcccagcaaccctaccattactcttttttttttttttttttttttgagacggagtctcgctctgtcgcccaggcgggactgcggactgcagtggcgcaatctcggctcactgcaagctctgcttcccgggttcacgccattctcctgcctc[226 bp omitted]aatccatgagaggctaaacaactctctcaacgtcatgcagcaagtcaggggcagacgtgggatctcgaccctggtctgtctgattaagaagccctgggaactctgcctcccaggatgcagaatgggggacagcaagaaaaaatatttctcagcaatggaacaatacctaagatttgcacttgagcatgttccattgtgcctgaatataaattagacaaagtgcaaaccagcatgtgaaacctcttgagtaccaattccgtcctagacatggcagagggacgccttgagactcttcagggtggtctggtggtgctgccaattaatgatatgagtctttgctctacccccaaattcaactgaagtttcacaactctttttctcaaagccagagaattgagggagacagcgttgtggctttctacaggtttaagtcttggttctgttttgaaaatgtcgctctagttagtttcctcctctcagtcctgcctaccttcagcctgcaaccgagtgagctgctcatctcttacctggttaactgccacagcctcctacagagtctcccaccccactcccttcctcctccattcattttccacatggcagtcagggagatgtttttcaaaagcaaacgcccctgcttaaacctctgcaaggctgcaaacttcttggttttgggctggcatattgttgagaaatcacaagacctgggccccacccaattccttctagcctcttctctcctgcactacatgagtcagctctgcccagccctgcctttctccaaagacaccatcctacttcataactctgtgctttcagacatgctgacatctatgctcagaacatgtccctgccttcattgagttaactcttactcatacttcatactccagctagggaatacttcctccagaaagccttccctgacaacctacccactgctcggaatggctgacatgccctcctggggctttgccagcaccctgtgctcccctccatcctgtcacactggacagtctgctcactcctacttgaacttcaaatctcagctggctcttccaaaccaaggtcaagtctgatgaagggagcccttttcttggtaccacatacttttccttcaagccccaattgctgcatatttgtgtgttcagctgattgatgcttgtctctccacactagactataagctctaggctatcttgcttttgctcacttcctgggctcactgggaagcagaatggggatggagacttgcatgcaagaggtttactgggcagtgtccttgggctccacacccaccgatcacacccatgcaggagggaagttggcaggagaagttgaatttccatgtagttgtaacagaggcctcagctgacctgtggggagttttggagtgggggtggcccttcagagctgtcctggattgaggcaaggtgccagaatttgtatccccattggatttggggtacccctggggaaaggacggaactgtgggtgaggtgcctctctaatttagagggcaattcccaggcttggaatttccagagtgaagcaatgtcagctaccaacactcacagtcggtgaatgcatgagtgccttagtttttcaaaggtggccatagtagtcaccatacttccataattccagtatctgcccttattccagggacacagtgagtgtgcaacaaatgctgaatcagtgaatacgtccatatatttttctctctttgctccatccctaaagagtgggactgtttcttatttatccaagtactctagacacagcttagcttagcataggcactcagtagaaatttgttgaatgattgaattaaaaaagaatgcatgaaagagataatgctgcaatttggtttataaagaaagataaatctggacacagctcagctgttcagaggctatgtaaagtgagtacacctgtgtggccctgccctatagagccagcatcccagaaagtagaaaatttggcaggtgggcaacacctctcacggcaaaccccttcctgtcctcaaggcccaagtgggatgtagctgggaagaggtttggtaaagaggaaatcaggtctccttctattaatgttgacagtcaattctctgtcttctgaaaacaaaaaaagaaatggctgcaggaactaggggtatttagaatagaaaatagccgatttagagagaatcacgcctgctatctgcaaatatttgaaggaatatcatttggaaaaaagaacagacatattctttcttgtactgccatggagaatagttctaggatttgggttggacatagagaaataaaataacaactaaagtgtccaacaataacctttcttgggagatgcacatattctgtcataataatggtgtgggttacaaaggtgtatccctttgtgtagggtaaacatacctgggaacaataacttaggcatgccctgaggatgaccctgtatggcagatgcatctgaatgtgtgttctgagctagagaattcaggaatggccaacctggagactcattccttgtctatgaggaacacctgagcccctgtcctgtcctgtgggacatgggccatacaggggattggggacctgagctttgggttagatggaggttgttaggtggaggtcattagtgggagggtgttaagtgaaaatgctatgtaaactgcatgctgtttgcaaatggtcgtggttttcctgcccagcccgccactgggcggctgaacagcggcggccactgggctgttcataaggcagatcagttgcccagcctcccaccactgggctgtttctgtatgtaaggcagttttcctgtatagcccgtcacacactgaactctctccgtatgtaagcccctagtaaaaccccgtgtctcatctgtgggctctgggtgtcttctttagcctcttgaacctggtgccttctctactgaggttaataggggttcagcacaaaaatttcccaaaacaatacaggtaaggtttgtgcaggtcaatgtacatgaatttttgcaacaacaaaaaagcgacgttaaattctcctctttttctcctccttcttttcctgctccccttcctccccctcctcatcttcaggtaaaggatagaagtgggcataggtacagaggaaacaagaatggcaaaatgttaatattgtaggacttgggtgataggtacaaggggttcattaaactattcgatctagcttgtatatgtttaaatatttttcataccaaaacacatacacgctaattattaaatgaagatgaagcaaccacaaacaattttgattgtcagttgaatgggctacattggaaggtagtgagctccctgtcactagaagtatttatgcaaatgctatctgcatgctcctcaactccccaaccccccaagagtctgggatattggaggatattgtcaagagcaggggactaagcggataaccttggcctggatcctcactttttcctcctggagggggggacttggctggagtctagaagagacctggattctccagagccatgaactggagcccgagctcctcattccagatcacaggaggtgctgaaggtggagtcagggcagacatctaagggccctaagcctgcggagaggggagtggagcgagatgggaatccaagtcagaatgaggaatcacagatttggaacacagtctgagccagtgacaacatgagatttggggttcagatccacatgccactgcttatcagctgtgtgtgtgaacctgagcaagggactcaaactctatgagcctcagtgttttcatctgtaaagtggaagataggattaccttacagggttgttggagaattaaatgaatgtgggcacctggcatagagcctactatgcttattgtggttattattatttacaaaggggagacgagcccatgcaaagacaggatccaatgggcagaacgggataggacttgaagacctgcttcaaacgccagctaccactggaggctcatatttctgggatggctaagggatgagtgtctgcatggcttaagcaggaggaaaaaaatctacatagacccttctattgataaaattttaggtttctagaggaatcccaagcaatttttaggagtaattgctggggctctccatgccctggatccctcccctctctcataaaactgcatgatgctggaaagctgtgtgttcatattgctaggacagtctgccacagctacccccacgacccccagaatcactcagctacagccttggaggccttggcttgtgaccctatcctagcccctgagccagtccacacagtgaatcccacaaggacaggcaaggcatctttttcatccctctctctgcagctcctgtcacaccaagggtgtctaacagctgcgtgcagggtaaacagacagatgcatgagctatgtgtgaggacaggtgcttcatgctcctgggagtcctgtgaggctggaggaggtcattctctctggggcggcctgtcctctccaagaggaccatgagtggccattgttggcaggcagaggcctcttcatttccctggccggctcaggctaccagtgtggctgccccgctgaacacgccatacatcacacgcctaatggtgcgttttagaacataagtggtaaccaccaaatgggacccgagaagggaattagagccagacacacagtggggaggggaaaaaaaatcaagagtagcctcagaggaaatggggccagatacaatcatcctgagacaggagaaaaccatctcccaagcatcaagaggccaggggagttcattttatttaaaatgggttccctttatggagagctggcctggatgctgggcaccatcaatgctacctgcactgggtctgcctagcctgacctgggccacagctttctgaaatgctctgtgacctccttccagccacctattcaggttttcattcaacaaatattttggcacacatactatgtggctcaaggttatgtactgtaacatttaaacttatgcaatgtgagccaaatcgcctgtctttgaatgatggttctgcccccaaactgggtagttagtgaatttcccttgcttcagttcttcctggtattaccctccatcttacaaaggctgtcatgatgttaagaaataaaaccggttaagtgtttagaatggcagtgagtaggtccccaagggtccctgtcctcctggaacacacattctaacattcaagcagagtgaggtggctgggggccagttgttttcaggtcccccgtgtccagttcaaggtctgcacacagtaggcattcagggcattttatgtgaaccaagcacagagcacacacacacagactcacacacatgcatgcacgtacatacagatgcatgtgcgctcatgcacacttgcgacctagagcctctggtagagtccaatttcctgggtaggtaggtgaagttttccagaccagtttaatgaaaaggcagctattcctgggtcctggctttatgcaggcatcttggttccagggctgtctcatgtctggcccttggagtttccctttttgtagagcttggctctgccttcaaaattttaaaaattgttacgtcctgcttttctatgtgcatggagtgggagataactttgtgttggctcagtccattctggggatggaactagaaatcatgagctgaattttaattttacttgctcatgtcctaccttgtttctcaaagtttttgaggtcgtttatatagacagatgaacaataaatggtttctaccctcaaggattgtatagtctcttctgagggtaaagtgtgtaagcaaacggctacaataaacaacagcagaaagaaatgcatggtaaatggaggaatcagttaaacacggggagagacagagttgggctgagcgatcagctctcacctgagcgatcagaaaaggctcatggaagaggtgagattttcagtgaggtttgatggagaaggagcatttcaggacaccaaaggtggggaagggaagagggcacagcatgagcagagggcacagcgttggcagaggcgcagaggcagggcttgagtgaatgcgaggggtgctctgggagcagtgagcgtgctggcggaattgcaggggaggctgtggaggaagtactggatgggatgggaaaggtggactgaagatggtaaaggtggattgagccagattatggggaactgaaggctgggtaaaggccagatgttaggccagacagcttatgcagttatgtatgtaatccccagagttgccttacatgttattatgcctattttagggatgggaaacttagactctcagaagttacaagatattctaccataaacaaatgattatcccaaaggattcgatcttagatctgtaaactttaagtctgtgtgactccaaacttatgacactgctgccatgaggcagttcaagaaatagggaagttatgaaatgcagcggcaaggtaggtccgtggtgatctcccgggtgaggcattggagtgatgatgaacactgtccctcctccttctaccctgccccatcactaccatcaaaaggatagaggaaatgacaagctgaatggaggttaaaagtaaaagagaagaagggcagagagacatcaatgcaaggactttgtgaaggcttagcggtggagggcacaggaaaagggatcaaatcgtcaacccacaaaagacagtctgggaattatgcctcagctcacttgacagaacagagtctgaggtgcagagaaaggaccgcagcttctgcctctgtgcttgattgagggactccttcactcatgcactcaacatccaatctcctacatgcccagcactgagggttatggagaggccaaagacacagaaggtgagggggaagatattgagcaagtaatattacatatgcaagtgcaaaaccttgtttatttctctaagtgacttggtgtggcagatgttaccatccccattttacatataagaaagccaagctcagaaaggttaagtcagttgtccaaggtagagctgggattcacaccgaggtcagtgtgctaccaaagcccgttccttttcaccagtgctctctgctcccctgctgtaatacctgccctccaaaagcttacagagcagagggatggcaacattgattgccccaaggaggacactttggagagtgaaagcaaggagcccactcagtattatgccagatgggaggcaaaacctgacactgtcccgggcaaactgggatgtagtccccttatactaaaaaggagttatttatatttgtgtgaggatttaaagttcctcagagcctgttcttactttcagtcatgtttcatttatatggcaaaacaagaaagtttcccagcttgctgaagctcatcctttcaaacacttccagagcctggataattctggatggtaagcattgaaacgcagcactggttgtcctgcctgagtagagagccctcaacctgggttgtccccgggctggccttgctctcccacttggctggggagggctcccatggcttgtggtgtcaggagcagagctctgagaaggggaactccatcatagcccctgccccaaaggttgctccacaagactggcattctcagactctaataagttctgtactgggctttctgtggctggcttccttcagagaaactcaaaccagcatcaactaagtcagagacttaggatagcagagaaatattaccacaagaaagatgagaaggccctggaggtgagagggggtctttgagctcagtgagttcaaactcttcacattatagatgaagacactgtgactcggagaagaaaggtgacttgcccagtcatatgctaataagtggtaaaatgggactggaatgtgggttttctgacttccaggatgaagttcattccgcttagccctgctgccctcatgaacgtcctgctcatccttcttccaccccagctgcccaggacctcaggaaagtgcccggaacatgccccgctgtctcatccctccatgcctttgccactgctcttctgcctgcctggaataccctttccaggaataccctgcctagaaaatactttcccctcttcaagaggaagtggaagcatcccatctgggcagccttacttgaatcactgtgccttactctgcctctctgggtcttgttcccggattaatttttggtatctattatagggtggaatttatgtgtccatctctccatttgactccaggctcccagagggcaaaaatttgctcttgttcatctctgtatcccactgccctgtgagggcatgtagcgaactctcaatcaatgttactgtattgaatggaatgagaggtatgacaagaggttgggaaggggcaaagatggagccaggcaggaggagacaggctccgacactgacttcctcatgtcaccatgttgacaagggaggccctgtgtagagaaggggtttagaacgggtctaagggagcagggggagaggcaaggggggctggcaatcctagagactgctcaaccctgcctctgcctgttggagtcagcctttggaaaagtactagtgaattaaagcccaataaaaaagtcaattaagtccaaactcatttatgccttaagctcctccaagccagtgagctggaatgcaagctgggccaatatttctccatttccctccatgtctacattggtctccagtgaggcagccgtgacacattttatttcaactataaatggggcagatagacgggtagcaaagtaatggctgctgggggctctctggatcccatccaagagattcatgtcagtgggcgtaatgttcatgtcctgaccttgggctctgatagagcatagggaatctgtgtgcttgtgcatgtgttcccgtgtgcacgtgtgtttgcatacatgtactgggggtgtggatgtgtctgtgtgcactattgtttgctatatataaaagtgcaatttgcacatttgtgtgttgattcatccatttattccacacatatttactgagcaccagacactgtgcttgcctctggtgttctcaagatagagaaggtttcagctcttacacttatgggttatacggtccagaggtctagaaaaatacacacaataaaacaagtaatgacaataaagtgtatagaatgttatatgaacacaggtatgcacatgcatgcttgaatatctgagtgcatacatgcttggatatctatgaatgtatgtgcatgaatcaagtctcttctgtgtgcatgtgttttgtgtaagctgaacccagctgacccatgtcgtggaaaacttcttctggaagcccttgcaaaccagtgatagctaaagtgatgtgatttgtgtgtgtgtgagttggggaaagatgagaagaaagaattaaagttgtcagtggtatctgagtctgaagaaggggcaaaatacttaaagagtatgcataacccatggcttctccactttcctttcatttccccttgagctcatatgaccattgctcacccacggaaccctcaggaggctagggctgaccctcattgttgggatagatggagaaagtctggactagggtaacagcacatggattctattcccagtcctgctgctaaataggaaattcattgcaaaaagggatgtggagttaggagtcccaaacctgcctttaccagctgtacaaccttgggcaagtttcttaatctctctgagcctcagtttcctcatttgtaaagaaagtgtaataatcctgtctctatctaccatcacaggactgctatgacagtcctgttctaaagcacccatacagaagtggaacgtagctaacatttctaacagttattgttcctacacgggacagccgcctgctgctgggcctttctaaaggaagctttgactccactcacatctgattccttgcatagcattttgctaagtattgtccccaaaatactacttctatgagatgcttaaaggaagaaaacaagatgctgtggtctaataggttagaaaacgctgggctagctagggttaaagatgtttatttcttacagaacttatcagaggctttattatgccaatgtgcattgtgaatctccaagtgggtggcagagcatacaccacttctgtctgagattggatccctccaggggctagaatttaagggcaatggtacatttgaaggtgacttcaggaagacctaggaaaggagtgcagaaatgaggtggggaagggaagacaaccaatatagcatatatttggagccagttcctgctatggatgactggggcttagccctgcaggggacctctgagagatggtgaaaaccacactgcagggttggggaggaagctgggctcattcctatttattgttggttgagagctactcttggagtgttgccatcccaggagttttggcctgctcagtgcttacacccagagtgtttccatggctggcagatgttcttgggcagaaagtcactattctcaggaagtgcctgacagcaggaatagagtacatggaggtgatatgggacagagcactgaaagcatctgctgcaagttcctcacctgacttgttctccaaatgtacaaaatccctccacagatgagccctaatctatttttcaaattgtaatctttcccactgccttttagcctaaaagacaggctgtgtggattgctacagtgggagtggattgctgcagtgggaggggtgaacacaaaccatctctcttctaacttggatttccggtgacctttaaaacatctgtcacttgatgtaccttatggaatagggtctgtggctcacagtagggcagaggaatccagcagtttgggggacagagggtcctgggaggtggttattcaagaggtctggcaccaggaaagccagaattcttgctggaaaagccaagattgagactggaaagtcagagttaagctttagatacaaagtgccagcaacaagcaatggatgggctaaggtgggagagcctatgtcaaatgtcccttccatgagccactgcttcaggagttgtcatggtgtctcaagggagccatgtcaggctgcacagagaacatcagagctagaagcacaggaaccctgaggattatttaacctttaaattatctaacatttaagtacaaggaaaattgaggactagagaggtgaaaggacttccccagagattacacccagcaatttaagagcagggcatgaatcagaacacacatcccttgctcactattgagaccttcactcggaagtccttgactagtacacttcttcctgccaagaatttgaccattgcccgtggattttttgatgaggaaataatccaagcaacatccctttgctccagccccttcctgccccaccttcctgccatcagcggtggcaccgaagccctcccttcacctttcctcttacttcttcatattcctcggagggctccctgccacctcaggtagtaataatatttttgatttttagacatgccagcaagtttttccaggcaatgtgaggagcacaaatgctaatgcctccatctggggattatgttaatatactatcttgaattgacattttaaaaaaatgcatattttaactggctgccttttctgtctccaagtccaggatcacatagtatttagtgggatggtagaagtggttagagaaaggccctgggttgggttggaagtagtgccagcctggggatcagaagtcctggaattcagtaccctggcatgtggccttaggtggggcacttctcatgtctgggcctcattttcctcaattgtaaagtgggagggcagggctggacaatccctaaacctccttccagctctcaccatccatggcttttgactgtcagagtctcctcaaagctcttgccttcttccatcatctttgccctggattccagggctgccagcaatgtcacctctccctgaccttgggactgttagtttatatgctggggacagactctttcctgcctacctgttatctctcttggacttacctccctaaactctcaacctgaggccagccccctcttctgactggagtgaaacatggtgaggatggagctgtttccagtcccttccccagatctattctttctctgaagcccaaagtaaattttcttggaaaaatctttcagtccattctgtgtccagaatttgctaaatatgatcccctttttgcttatccaataattggtgactgttgtgggcaacactgttttgggcacagccccccacaaccctttccttgatgttgtcccacacttcagtgaccaccttggccaggcccccaacatctcttatctgggctactggggttcccctggctctcagccttgctctctgctggtttgttgctgatgctgccaaagtccccttcattccctgcagcagcatgtcccctcctgctggtctctcagactgggcccctggtttcaaagactcactcccagacacccctatcatgggccatgccttgaagagtacctgtatacttcccctcccttctttccccggagagacaagattgcaagcttggataagtgcagaactaggaggcaggaagaaatgagtgtcagcctgggtcctgccattagctattgtgttctaatgctagtcccttcacggtacagaaactcagtcttccctaaaatgggactaacacgttttgccccatctacctgccggggttgtacatggattcgtaaaggagaatgtgctatacagaagggattatttgggtgttttttcaaatgtcttctgggggccagctgcatcagcactacctggggatagtaagaagatacagattcctgggcctggcccagagctactgaaccagactctctgataataaggcccaggaatctgggctttaaataagcttctcaggtgagtcccgaagtctaaggctctctggttattgtgatggtagctggcactcccagattgtgttcccacctctccctttggctgcttggacccactgcacatgctctgaagacttgatttgtgcctagtgtatgggcagcttctctccactccccagtgctgggataatttttgagtacatcggagaagcaacatggtgtagtggaaaaagcaggagctttggaattagaccagtatttgaaccccagctctgctactgattatccatgtgactttgggtaaattgcctgactccctgagtcttcattgttctcctttctatgatgggaattacagcaattatctcaaggctgtggttagcattgcaggaaatatatatacataaagtagctgccacattgtacaagcccatgaaaagctatttcctccacccaaggggccagagacctgctgtgtttgtttaaggtgggtgtcacgtcacatggtgtgtttggactgaaacccacaggggacctgatttgggaagcctggcagcaagtgtaagacttttgctgaattccccagagcccaagccttgtcctgaaagagacccacggctccctgtgcaggactattaaagttaaataagctgctctgtgagacatgcattattaaaagcatgctggactagctgttaagcccagccagggctgcctcagtgaatggggctcccctggggcacattccatccgggccacaaggcagaaccacaagacagaaccacaagacatggacacagcatgagcacagcctttgccctggatggggcagctaagcctgagcagagcaacacagtgggctcctgcagagctctgggggctctgagttgcagcttttcatttgcaaagaaagagagtcgcctgtctccctcattggactaggggctttccaaggacagagctgtgtctctcgcatcagagagtgagtcctcttatggcagccatcagattaggtttcttgggcagggccatatctccatcaccagattgaaggactcctccccaagggtgaaggctgcttgtgatctttgtcccagaaagtatctagagcatccctttctcccagcctctaggctcctgcagccctgagggctctgccccttgctttgtaagcagtaaaaaagcagaaggcaaccagctttcttttacaggttgttgggttttaaataaagatagttaaaatgatttatattctgctcagggggaaaactggggagaggaaggaggagtaggttttcctggcaaggaaaagcggcataaaatgtcccactaaatgctcactcagtggcctccattccttcaagcacagagcaaacacttgtgatttaagctacacccggtgacaggttagtatcagaactgtgactgtgggtttgacccaaacactttggtgttgtaaggcttcccagaagacaaaggacagagagggaagagctgattccagggtgagaagaaggggttcctagagggatggcggtagctcccagcagatataattcccattacatgggcttcaactcttgtccattaatttatactctgagctctaggtcaagagcttgagtaggaggttgacctgagcttctcccagctctgctgttaactcatcatgtttccatgcgtgaacctcttaccctcatgaaacctcagtcattagtgacttgtgctttcttaaaaacaccatctgtaactatacagggtgtccatgaagtctgaaaacttaggtgaatgtacaaaatagcaataaggacatcttcaatttgttacaaaatgaaatcgtatctatgtttgcagaccctattggcatatatttatgtgtgtaagattattttataaatatctgtcttctccattagactacaaacccctcaagagcaaagaccaggagtttgttctctgttgctttttcagcactctgcacagtgcttggcacattctgagagctccatacatagtaattaaatgaattaataaataaacgaatggcaaggtttatcttgggaatggggaaggtaatgaaataaagtaaggactcaaaagtgagctttgagaggatgtgctcagatgtttgagacacccagctcattaactggactctttatggtgttgagaagtagcatttctgcccagagtatttggttgtgataaaagaggtagtagagaggtaagattcaccatgcagaggcgaatccactcttatcacccagctgcttctgaacatttatagatcccttctctgtcttcaaaggatagctgtattcttttataaaggattagactcttgctctgagaatttgaactcatagcaggtcaatgcacacccagccaggggtcctcagcaatgcagagcaggttctctctctctgaagaagacagagcacagaaagcacaaagaacaagtgaggctggtatggggctctggggcatatggttctcttggctggaatgttaagtccctcactagtccacttaacttttcagactcagttccatgaccacaccctctactcaggtagaactgactgccttctcctttgggcctcactggaaatataggtattattttatcatgtgtctgaacataccagcaataagctatttattatgtatttgtcaatgtttctagatgtggtgaccaccctctatatgtatcccgtagatggtaaatttccttgagtggttggtgtggccagatgaaagggttggtcactgtccatggtcctgaaggctagggctgagtgtcttccagaacactgaatcatggatgtttccctaccttcttccacatataaaccaaaaagctcaataagggcttagtgatgagctgcgagaagaaaacatgggtcccagggtgacccaaagaaggatgtgattggttctacctgttgcatgtgactccaaagcctgccagcatgctacctgatgctagtcaataattgagatagcagtgtaggtaggttgcttagaccgctgagtctttcttagatcatggatgctagcttcaggtgaaatgtagatatcttgacatgtagatatctcaggtggaccacatttagggacaaatataggttggacttgaggtgtgctaaagtcttttgcattctagggagctaggaattgctcattttcaatagtattaatctcatgatgaaaagtaattattacaccctttaaagcatttcacatgtagttttaaaagtgcaatttattgaacacctactatgtgccaggtaccatgagagttgcttttgtttctcatatattatccctaatccttcaaataacccagttagaaaagctattattaaccccattttgggaagaatagaaaattgtcagaatggccaaacaagcagcccaaggtcacagagccagttaacaactgagttaactcctgactgttggtctctacagacagtctatgtctttttactagtctatactaccgaatcttttaccaactgcctagcaacagaaaaaatagtttccatagcaacgatagtaaaatcagtattggcatttggataatccaatttttccaaaaaaacccccataaaacaaaaaatccaaccctaagctagtattccacatctggaaatgtaattgaagaaaacaatcttagccatggaaaagatgtatgcataaaggaatgtactgaagcattatctacaatctttaaaaaagttgcaataagaaatgtccaacaataggagaaagattaaatgcagtgtggtgcatcattcagtgtagtaaacatggtctggtataatatggtcccacttgatgcccaacccttctctttctaggaaaggcttccattttctgggaaccaactccccctgggcaatagtcatattataagaccctactttcctgagccatgtgattggtccggggtgggcacctcatccaagctgggccaatcagttacttttctggaattaaaaaacaaacaaacaaaaaaaaaaacgaaaaacaaaaacaaaaacaaaaaaacaggtttagagactgctcagtttctttttgggaacatggaatgtacagtaatatcaggaatatggctggccctgtcttgtccctgtgcaatgagggcagaagagggggcccatggtgagagagggaaagaacaagagtgggggagaaagagagagagcgggtgggatagggaagagaaggggatgggaaggagttgggtgcttgtgagcagtaaaagcaaaagtggagtccctacagcactccatcctgcttccaagtcttccaagagctcaacagcacttgaaccctgtgagataccctagcattcttccaataaactcctccctttacccaagccagttagaattagatttctcttatgtgtaagtgagagagtcctaatttaaatagtaggggtttaataccctgtgtttttaggaagaaaatgtagggctgcctagggtgaccgatgcataattccaaggtggaaaacctctgggcccacaagaagcagcctgggggagaaacttgacataaccagaggagaaggtgtggtgtgcactgagcccagagctcatgagggttggggagctgggacacccactatatgggtatctatcatgactttaggacatgtacctagacccctacccttccagaaaactcactctcctgaagatactatggaaatcagacaagtagtggatgaatccgatctgagtcattgctccttcattttcattggcctggaagctccatgacaatcaaggttgtctcctattcagctctgcattcctagagctagtacaaggcctggtgcagagcaggtgccacgtgagtgcttactctcctccaggaggtagactggagttgcatttcagttcccttcttactcaatatatggggttgctatttatacatagtctctcagcttcaaacccttctatgttcttctttgatggtggggccaggactctgcaaactatattttctggttccctcttcccaggagactggcaggcctgggtggactggggaaggcagcctctaccagcttccagctcaggtctgcacccttctggcatcaggggacattgatggtcctagactccagtttcttttggcattcttggcaccactgcagcaccagcgttgccatgcacctcgtcctctgggctgccatccctgcctgcggtctgagcaactattgggctacatgccataatctctttagcaactgcctggcatcacctcccgactagatcgtagtaacaccatttcttccctttccttgcccagccctagagggtggcaatggcttcctgcagagattaatctccaggttacctcactgctctcttttggctttttcagacttctaacacatgcataagatatttccaacattaaatagcctttgtttcaaattccttacctatttccgtatttctgacaatacgtgatttattttaactttttttgaatctcaatttcttcatctatgaaaatgagggaataatccttaactcttgaagatgttgggagaattcaatgacatgataatcaagtacctggaagaataggtgcttaaaaatgctggttactcctttcgccccatgaccaaatagtcaacctgtctatgcaggaggctttctcctcttgatgacttgctgaaagaattggtggcaagggcacagggcacaggaattgtgccctgagcagcaagaagccatgcttagtggagctccctcaccctcccgccacagccgacccagagacatggccagtggagatccatggccaggtggaggcaaaagtgttcagaatgaatagtgtcttcaaaacatttcctgctcttagcacccgctatcttagtcacttgagcagattctaatttagtctcagaaatattcttcaatggccccaggcaggtgctatatttcatgacagagatgagaacaggaagctcaacttcccgcctcctcagagtcaatgacgaatccctggaagtcagcagaatgaggaaagggggaaaagctaccacccacaggacagttgaatgaatgagcaactaaatgaataccactgggtactaggctctagctttggggcttggaaagcatcttctctcattcagtcttcacagcaacttacctgtccatgttacagatgaggaaattgaccctcggaggggttaggaaggtagcccacatcccagaatcaaggtggcagagtggggtttgaagcccacttggctggctgcggacctattctctaggtcctcccagagggcacctggctctgactcaacttcctactatcaaaaactaggaaacaggttggctctggaatctgaataggtaacactcagatcatatttcttagaaaccaaactcctagtttgctcacagccaaacagcctgaactgagctaagacaagagcatcctgtggagatcaggcagaaagatctgtgcccagctcatgcctctggagctcggagacctctgtgccggcagaagacagcatcacacctgtgtcctcatctgctcgaccttggctttcagctggctggtttgcaaagaacagccgaggcctaggccagaaggagagaaggaggaggatgcatttggaaggacctagaagttacatgataaatgccagaggcctggggctatctgcttgggagctcttattacttcagtcattctcaggggggaaatcagctcatagcaaacccaacctgagccactttcctgtgctaatgtcaatcaacgggtcaaactgagtaattctatttttcactgctgctgtttccattttgctccttgatatcttctaaagaactatactcccctacttggaaaatgtgcttgcttatttttattccacatctgaagtaagaacttaataactatcaagtctgggtaaggctaggtaaactggacaatatgacaagaatagggtagatggcaggagtgctattatttttatcattgtagaaacctgtgaaaatttaaatattttagaacacataaagtggatggtaaaaactgcaaaaaaagcagacttaaaaagtaaataagagaagagagaaaccagttgaagcaaacatttgagatgagctagtaacagtatgtgcattgtggattcagatccaaatatcctgatagccaatgtccaaaaaagagaaacaattttcattgtttgataaaagacatcatacaagttcagctggtacttaagtctagaaagacaggtgggctgatgttgtcttactcaatagaaacaactgcaactttgataacattaatatacaccagtgtttgggccagaggaagtgttgttctctctaacaagtttcaattcagtatcttttttttttcttacatttaattggacacagcaggattgtcctagagggactacggtgcagcagcacagaggaggtaaaataatctttctgtgtttgtgccataggaggatctgctaataatttttctaatgagcaaaaatgaccccacactacagtgaaatcccgggccagtgccaacttagactcagctggcatgcaggggaagcaaggagactaacatttattgaccgtggcacatccatcacttttaaatgcttgcaacaagcctgtggaccccaatttagctcctactcaggggcttccctctccaagttggagctgcgtgctgtgggcgctggttttcatcacagactggaggaccgggatgcatagctctgtatgttcacttggaatcctgcaatatccaagcaggtgaactttggagacaaggacacttcacgctactgaacagatgcaggaagtgaggcctggagaggggcaaagaccagagtagaaccaggcttttcatttaagacaacaaatcaagcatccctaaaatgtaaagtaataataacaacgccttgtcagtatataataggagcacagttagcaaggtgcttcacaccttctgtgccgtttcatctgtcccacaggttgacagggagataagcagactttatgcttttagtgaatgccatactgcacaaagaaacattgacacataccatatgctacccacataagccagcagtgattaaactcattccacaggtaactgaattggggttcaggaaggagaaatgaactgcccaaggtcacacaggaagtggcaaagccaggactcaatcaaggtcacccaacttcacatttaaggtttgttcaatcctaccatgattcctttcacctaaacattaggatgtgcgagaagaagcacacttgggtatcaatgcatcatttccaaagtgcacagtgactaagatcctagggccggaggtcaaactgcctgggtttcaacctcagttctgccattaccatggctgtgccatttacttaaccttactgtgtttcagttttcttacctgtaaaatggaaagaatgataataaattccatacttctttattatgaaaattaaaagatgatgtgagaaagcatttagatggatgtcctgctcagacctcaaaaaatattagctcacagtattttttaattataaaagtcataataaaacagttgtatcaaagtaataagaaataaaaagttgttataaaaaataaaaacttgaggccaggtgcgctggctcacacctgtaatcccagtagtttgggaggccaaggcaggcggatcatctgaggtcaggagttcaagaccagcctggccaacgtggtgaaaccccatctctactaaaaatacaaaaattagctgggcatgatggcaggcacgtgtagtcccagttactcaggagactgaggcaggagaattgattgaattcaggaggtggaggttgcagtgagctgagatcatgctgctgcactccagcgtgggtgacagagcaagagtctgtcttaaaaaaaagaaacaaaaacaaaaacaaaaaaacaaaaaacaaacttgacatatatcttttctgacatttcagtttcagatttttgttttgtagaaaaatgggaaatatagaaacataaagaaaacaaaaaattattgtaatcccaacacatagcaataatcataatgttttggtgtttttccagctgtctttttttctaacatatgaactacaaactttgtttctatgtgttttttatttggcattaaaacatgggtattttcctatgcccctgaatagttttttaaagtataactttcagccattataaaactatgttcttctgtaggtggaccataatttatgtactcattacataatgtttgagtgaagttgactattctttcatcattgagtgaagaggctacgtcagatttgcagctgcctctctgacactaacacagtgacttgtatatagtagatgcttaataaacattcaggtgactgaaaactcatgttttgataggtgtttccagaaagttcataccaatttatattcctgcatttattgcatgagtgtctttcacatagtaatctcagcagcatttgacttaaaaattgaaaaaaaaatttgccaatttgttaagtaaaatatgggacatcactattattttaatttttaatttatttgatcaatagtgaggttgaaagtttattcatattttaattagccatctgtattgtatttttcccttttccttttcttcctttcttatttttgtctttcccaccttcttttgaaagtaccattcttgaaggaacaggcaccagactaacagtcctgatacatttccttggataccctcacatttccagataattcatgaggttcataacaatgaattgggtgcttgctaattattttaagataattgcatgaataagttcagatgctcattaattctgaaagctgtgacagctctcaggtattaatgaatttcttactcaagtttagggagttggcagttgacacacagctttcctgacatttcagcttcagattgccattttgttttcctgtaattccatgcacaccttattaaagttcaattatggcttggaggaaccttcatctaaggcattagcatccagttaattactgagaagtgatgacaattgaagacaaatggatttcatttcctatcatgacaccagattccctcccaccacctgcccagtacaggtgcacatttctttggcacggatgccctacttgctgttcagggaatcacagaacattctagaactacaggagtcagaatatttgattttttgcctccaaaggaatgctcaaatcctcctggaaagatgttgtccattctcttcttggaacagctttggaaaccaaaggctagcttctactaataatcacttattccaaggtcttattattgataagcaataagttcttttttaaatcatagtgaagtctttcttgggggtgtgggggttcatgcctgtaatcccagcactttgggaggctgagggggtggatcacttgaggtcaggagtttgagactagcctggctaacatggagaaaccctgtctctactaaaaatacaaaaaattagccgggcgtagtggcgggcgcctgtagtcccagctacttgggaggctgaggc[138 bp omitted]gtgtcaggcacttgtaatcccagctattcgggaggctgaggtaggagaattgcttgaacccaggaggtggaggttgcagtgagctgagatagcaccactgcactctagcctgggtgacagagcgagactccatctggaggaaaaaataaagaatgctgggtgtagtggctcacacatataatcccagcactttgggaggctgacggatggatcacttgaggtcaggagtttgagaccagcctgccaacatggtgaaaccccatctctactaaaacacacacacacacgcacacacacacacacacacgcgcgcacacacacacacacacaattagccaggtttggtggcctacacctctagtctcagctactctggaggctgagg[131 bp omitted]ttcctgctttaatttctgccactgactcctacgtgaccttagaaagttctcttgtggtttcctcatttctagaatgatggtccttgtgacggtttgaatgtgtacccagaagttcattcgttggaaacttaatccccaatgcaacagtgttgagaggtgggacttttaaggggtgtttaggtcacaagggctctgctctcatgaataaattaatgaagctattgtgggagtgggtcagttatcacggaggtgggttcctgataaaaggatgggttcaccccacttccctgctccctctcatgtgtgctctcttgcctgtcctccttctgccatgggatgacgcaccaagaaaggccttgccagatgcaggctcttcgaccttggacttcccagccgcggaactgtaagaaataaatctctgttctttattaattaccaggtattctgttatagcagcacaaaatgggctaagacacttctggagtaatcaccctgtgttaagtcataattctaaagcccaagatgtaagtaaagtgcttcatatatgagagttgcttaataaatgttgtttcccctttgtgaaatgccttttgttgcaaaaaagggataggagggagctaacactgattaagggtctaccatttaatgtcatctcctctggagactttccctctaccatcttaattagtactgaaaacaatcctgtggagtagataatattattatctttattttacagatgaggaaccaaagttcaaggaggttcaacgtcttacagatttggtggtgcacttgctcttcccactgcccagtgaagcgctactcgatcatactagacacaatgtggttggtctatgggagggagtatcaggaagcatgaggagcccacacttctacaaagagtcgagatgccttcacaaagatgcctcatgctgcaaggtcgtgaatgccaagtgctctagtgtttcagaggtggaggagatccctacagatgaggcaccaggaaaagcttcaaggtggaggccggtctgagtctggcctcaaaggatgaaatgattcagataaacagcaaaacaaagcaacaggaagggagagataacaacaaaggcagagatgtaggagtgagcaagggagactgaatgagcagtccctgggacagaaggtgtgcacagggaggtgggagagagagtgctaggaagggaggctggcacatggaacatggagggttttcagtgtcatgttcagggctttggacttgttcctgagacctgggtttcccaaagggagttctgctactggggagagcctcagaggaaagaataaaacagaattccctgtacatcatccctttcctggtgagttacaatgcacattagcatgttacgtggtctgggcagtactacggaaaagaaaggcatacaaggtatttatttttttaactttccactgggaaatttccaattaaataaggttgaaaaatcgaacccagcagaggagcaatagaaaccctcccctccgaggccggaaggtaattcagtcacccctggggtttctcttcctgagaagaaatcttgtgcctgtggcttggatggctgcagctacttcctcccaggaggccccttcctggctttctttttcctctcagtttccagagtttgaggctcgtaaagctctttattatgcgtaactcatgtagcactcagatgggatggtcatccccattgcagagatgaggaaacagtctcagaattgaagcaccctcccaagatcccatagccaggtgggggtagagccagcatgggcacccagggcccccagtgtggggttctccccgatgctctgccagctaactcctcccctgtcctttctggggtgaccaggcttccactccactttaaggagcgatggatgtagattggctttatttgcaggggtgagagtgcacttgggaaggaagatctggttccatgatttgggggcaatatgatcacaggctaataactcaagagttacatgaggaagtgggggaaatctagggaagtgctttacttattttttgagtgcttactatggtctctacactcatgaacacattccagtctttggaaagtgggagggaggcatggtgtctggtttcttgggtgcagtaatggtgggctttcgtctactattttgacgacagttttgcagggtttatgctttcacaatttaagtgatatatgtttcccaggtatgcggctgatttcatgtctatggtgaacactgatgtctcatcccatttcccttcaaggaaagacagacctattgccctctgctatcagcagaggtctgtgacatcagctcccttagggactgcattaggctagagagaggagctccacctaagatcttgttccttccagagacagcccacgtccactcttgatccatgtgaatttggggggcctggccaccttggcccaacttgggttagctctgaagggccactgagatccgagctcctgcgggtttggcaaggtttcctgttgggtctggcaaatcacagtttgacttctccccactctgcttatcctgtttccttcccctctggtcccaagggtgctccttcatgaacatcctgcagactgaactctacctcagggtctgcttcctgggaactagggtgaccaggcatcccagtttgcctgagatgtaggaccaagacagtcctgggcaactaggatcctacagcaaacccaacctcagacaatgtacttctgtttattattgttatctttttgagaggcagggtctcactatgttgcccaggcttgggtgcagtggctattcacaggtgtgatcatagcttactgcaacctcaaactcctgtactcaagaatcctcctgcctcagcttcttgagtagctggaactatagacatgtgccaccatgttatgctgtgtctatatattctaatactttcatggcaacaaattatttcattctttaaaaagttggtagcagggcatttgccatatcccccttaatgcttccccaacaatatcatgggaatcttggggagatgggtattatggttattatctccccaatcttggtgaagcaggtattagccctaggaaattaggactcagagaagttaagaaacttttcccaggccacacagcacagtagccatgccggaatgaaacctaggcctactgagtccaatgcctgccctctatccaccaggcctctttggttttaagacacgcaccttggccgtgtgttccaaacacagctgtaggtaactaaggaggcagagaagagcagttgctgaatcccaaacatgcttggagctttttgcaaaataaaatcgcactttttattcaatgcctaccttcccatgcaggcctagttttaagcttctgaactttctgctaattactgtcacattaattaaaaaataaatcctttttaatttcctaacaggtggtttgtgaggctggaagaggagttgaaacttgtttgtaattattgtgtggtgtatttgcatttctaattgcgctgagggacactgaaggccaagcttccagtctctgggctgtctttcacctgcgccgcggtgctgagttgttggcggcggcggcagcgtcttttctccaagcagcacctgtgagagcagcagctccagctggagtcccaagacttccaatcaacatagagagccacagggcctgtgcctgcgtgggtttgctgtaaggagcctgtaacgcatcgaggagcccagcgcccaaccccacacctggcattggctgggtgctcaataaatgctggctgaccacggctgttcctgaacgaatccttatctcgcttatctgattcaagcgccgggtgggcgcactgtgggctggcagcaagggttcctgatgccaggactcttggatttgctccacaggtgtctgcgcatccatctggaaactgagcatctgtgcagggaatccatttcctcttctaacttctgaatagctttagatacttctgacttctgaacccctttagatgtatgctgtcatttaccaggaacatcctaacattgatgattgaggcttctttggccatttctgcctccacaagccttactttttttttttcttttttctcttctttctttctttcttttttttttttttgagacgatgtctagctctgtcgccaggctggagtgcactggcaggatctcggatcactgcaacctcagcctcccgggttcaagcaattctcctgcctcagcctctcgagtagctgggattacaggcgcctgctaccacacccagctaatttttgtatttttagtagagatggggtttcactgtgttggccaggctggtctccaactcctgacttccagtgatctcaaagtgctagttacaggtgtgagccactgcacccggtcctccacagcctttctgtaaaggagttaatgagccgcagagtactacttgagtgcattgtaagcactttttacttaaggccccaatttaatgtggtggaaggattacaggctttgaggtcagacctaccatggtttgaattctggctctaccacttagcagctgagagactggagaaatcatttaacctctctgggcctcacacagcttttaaaatctgtcagatggacaaaatcataacttggttctgaatttctcaaacttagatacacatcaaaatcacctagggagcttgtttttttttttttaaccgagtctcactccgttgcccaggctggagtgcagtggcatgatcttggctcactgcaacctccgccctgccagttaaagtgattctcctgcctcagcctccctagtagctgggattacaggcacctgccactgcacctggctaatttttgtatttttagtagagacagggtttctccattttggccaggctggtcttgaactcctgaccctgtaatccacccaccttggcctcccaaagtgctaggattaggcatgagtcaccatgcctggcttagggagcttttaaaaatgatcagcttttaaaaataatcatcagtaaatgctggctcggtgtggtggctcacacctgtaatcccagcactttgggaggctgaagtgggtggatcacgaggtcaggagtttgagaccagcctgaccaacatgttgaaactctgtctctaataaaaatacaaaaattagccaggtgtggtggcatgggcctgtaatcccagctactcaggaggctgaggcagg[135 bp omitted]ggttaggctgcagccagaactgattaaatcagactggggagacgggaggaagggaatattggatatcatgattttaaaaagctgtctgggtgattctgttaggtagtcagggctgggaaccactgcctgagcctcttgacatgctcagacaatgctggttcaaccctttccttcccttgccttgggaaatatagcctggctatagtggttctgggagcagcgggggtcccaggcaggttactgaggctgagatccaagaggtcaggatggggactcagggactgcaactaactcatgagatggcacgtggtcaaggcaaaaaaacccccagcactcccctcctcagtgtccctctccctggtcagtgaaatgagagttcattaccttgcttgtccaactctagacacccccagggaaaccaaccaatcagggcttctgacaaaatgaaggccaagaatgatgtcataaaggaaatgatgctaagttttatttcaggccagccttacatctcttatctctttgatctcatcacaaccctgtaggataggcaccgtgatgcccattttacagatgaataaaccgaggctctttgaggttaagtaactatgtatcctttaagtactagagccacaagccaagcccagtctgtccaattccaaaactcttcatctgcctcctgtacatgtggccttccttacatcagtaaatagcttattataagtaaactacatccttatagtttcttgggtcagacatcctggagtcacctttgactcctctctttccctcacaccccacatctaacccattgggaaatcccactgaatctgtctttatgacatatcaagaatgcaagcaggttgccacctccctgctcccaccttggtctgagcacctccatatctcacctgaaataatggtgggtctcaccacctctgcacttacccatgttgtgtacttgcagcacagcagctggagtgctaataacgtttccccgacactgccctcccatggcttccatcccactctaagtcaaagccacatcctcaccatggcctgtactgccctgcaaaaggtagactctctgagctcatcacctaccacttctccccaggggctcacactgctttcctgaaagctctccaagtacaggcttctgcccttgctgttccctcctcctggaatgttcctcccccagcattgacatggctttctgctctcccatcctcgtggttttcagggtgactctaatgtcacctgtttaaaatggaaatgaacccaccagcacaccctgtcctcctctcctgttttattttttctccgtagtgctcatcaccatctggtatcctaccagtataaccctactgatttgtttattgtctgtcttctgtgattagatcttcatctctttggctcactgctccatcccaggtgccttgtacaatgcctagcgcataggaggtgctcagcaatacttgaatgaatgaatgaatgaatgaatgagtgaatcctgccaccccctcaagggaaaggtgagatgacttctgagcagcggctagtgaaaaaacttgggagacaaggttggggagaggtgttcccagtgggctgctggatttcccctactggtctagggggtgaatgaagggatggctcaggaggtccctggagtattaactgctgggccctggtctgtggatcgctgtgaatgccaaagatctccaggtgggctctgaactaatccaataatgcaaatcctctgtccttttaggagagtgattggcatggccaaataatttttacctgttaccaagcctacttctcagcaacctataaaacgcaggctgtggagccaaactgtctgagttcaaaacccgatattactacttgtcacccatgagtgacttcgggcaagccgttcagtctctctgttccacctttgtaaaatgaagacaatccttatacctatttatggcatcatgaagattccagatgcctgcagagagcttaatatagggacaggcatgcgttagcattcaataaaggtcaactcttgtaattaagtgaggtgtagaaatttactaaacatcgatactcacaaatggaattcatgtgttgctggagtttactgaagactttaatttggcattctagcacaaaagtctgcatgccaagcaattgggcggtactgccacacccccaccacacctgagcccagctgagagtttgagttagtgactggggatgtgcgtggttaccagcgagagcattggcagtgttgtcttgagttgctgctgctttccagctgccacctttcttgctttgtaatgataaattaccattagtttagtttcatcattacccatttagtttgttgtgggttgtttgcttaacaacagtaatttgggcttatgatttttcaatggctgggttttaaggcatgtatgcattgcacttcaacgatgcatcatctatctcccttcctaaggcaaatctttctctagtctttccccaaaatcgtctgcctgtaacactttcatgttatctctgagttcttttttttgctaaaatactgggacagatgagcaggaggctgtgagtgattttactctggtgaagcgggctgtggtcaaagaggatgggagacactgttctagatcagtctcccctctccctcccgttttattgatgggaaaactgaggctccgagaagtaaaggatcagagttcatacacggtcgctaaaatctagtcctcctagttacctggcctgggcttcttccacgccacatgacctgcctaggccagttccctttctcaatggaggactttgggtcctaacgaaagtgccttgaaattgcccactcttgggttagagtttcctcctggatcttccaatatggggctggtttgaagtagatttatgtagtgcataagagttgtggctctatagtcagactactatattgaactgtgtgacttggatgagttacttaatcttcttgtgcctcaatttccccagctataaaatgaggataatgatagcaccgacctcctatatctgggaaaatttggtaagacagttcacatagcatgcacaatgcctggcacatagaaaatgctcagtgaaaggctgggtgcagtgactcatgcctgtaatcccagcactttgggagactaaggtgggaggatcgcgtgagctcagaagtttgagaccagcctgggcaacatggcgaaacttcgtctctgcaaaaaataaacaaattagccaggcatggtggtgcacacctgtaatcccagccagttgggaggctaaggtgggaggattgcttgagcctaggaggtggaggctgcagtgagccaagatcgcaccactgctctccagcctgggtgacagagagagaccctgttaaaaaaaaaaaagaaaagaaaagaaaagaaaagaaaatgctcagtgaataatgattattgttaatatttttaggttccagagctgatgtcccactcccacctggaacctctcagggcattattatgcccatttaatagataagaaaatggagtctcagagttgtagaaactctgaactcaagacttgtgggcatacaggcagagtccttctattcccaacaccaccttcagggctaacctcagtgtctctgtgcttacgttctgccttgacagtctcttcctcttcattggtgctccactgtgtagtggggcagtccaaagcagctttttacacatttctaggctacttggagatcattctgtctttgttctgcatgggcagagcctctctcccattccattgcaagtggcttggcagcagagactgctatttctttaaaacacatctgagagaggtgggacagagcaggaatgcccctctgataggttccacctgcctggttgatgggaagatggctgggatggggtttggatggggaggcactgacaggttccaaacagactgcaagcttctctgtggcctgtggagtgctgttcatggcggggggagaggccctgggacaattcatgccctggtcctccacctcagctcttgcacctctgagttgttcagcaagtgtgcttagggtggacaactggggcaaagacagaaaacaccttcctttgaaactgaagctagtaaattcaacataaaggaggtgagattaagccatcagcagcagagacctgaaacagcttggagctgggctgttgcagcattgaaggggtttcctaaatctcaacacaagcttagaatacaatcaccattagagaagtagcagcatctattgttataatagaagataaaggcctgctccagggtgaaagaatcaggaattggctgtctcctgtgctgagaaagggtgggggagatggctaacatgcataccttagtctttcctgctggagtgagtaagaggactaaggtttatagagcacctactgtatgccaggcagtgtgctaaggatcttgtcttcctttatatgctccagccacactaaccttcttttcctctcaaacctaatttgttcccactacagagcctttgcacgtgctgctcttcctgcttcttctccctgccctttgcatgcatgtctgcttaatactattcaagctttagctcaaagtttgtcttctctgaaaggccttctccaaccctagttaaagccatatctccaccttgtcccaccatcacactcttccacatcactgtattttatcttctttaatgcacttatccattctcaaatattttatttatttccttgcttattttctgcttcccaccaatataatgtaagctctttgagggctgggattctttcagctttgttcacaaaaatatacttgaagtctagaacagtgcctggcacatagtatgtgttcaacaaatatcttttaccatctgatggctggggtctttccccacggcattttatgcaaacctcactaggatcccaggaggtggtataatggtttcattctgcacacaggatcagggagcatgagggactttctcagtgaataagtaataaagccagaattcctaggtttttttttttttttttttttttttttttgcttcaaaactgtgcttttaagtacaccacactgcttcaccaggggagagacagggacctgagatcagcataaggtaaagacactagccgttctcataaccaagatcccttcagcttccatcaagcaaccatctggtcttaggctggctttctaaggacatcttgctgaaagaagaaggtgctgaccacctgacgtgactctttcatgttgcctagcagtcatctcttccaaggaaagctaatcactgggcattctatttatcctccagtcttttgtgagagcttggttaatatgagcctccaccccatgcctgccccttggaggctgtaactcctggggatacagatacaatgagctcctgattaggcacaactgagaagcaaatcctgcggccaccctgtgaaggtgaataagggatgctcagatgacacttgtttcagcgttttgggccaaaaagcatcgccacataaatctcctcgcacggaacatctgccccaccccagaaaggtggcccatttctttcaagtgatatcagacagggcaaaattcctaaacaagcaacaaatatggatgttgtctggaagtcagctgttgaaatggcttgcctgggttcatgctcctcacagccccctcctgtctacaactgaatccctggcttcaccccactcccagctgtaggctgagccctgatccccactctggaatgtgtctgccctcctccagccacttctcctcagggccagctcagacctgatgctccagctctagttattgggtaaactgtctcacactcggacttggctcactattgaatgtcaattccagtgactgggaatgcatttcacaaattaattgctatttttgtgggtgtctaaaggtgagtggagtaggtagggggccgtggctcctgtttctcttccttcctggtagcagctcccctggagggcagcttctgtaggtcactctgtggttcatctgaagacacaacctgaagcacactccttcgtcttttctggcaattttgtaagcattcaatttccttttatgaatcccttttatacctaaagtgatcatggctgtttctctttcctgcactgaactctgactgagagtctactggcctgttcttgggctaagcttttgggacaaagaagcaagtcagacacagtcctgtccccagggtgctcattctggtggggtgggagtagggggtggtctgagaacttgaaggggaccactggatagacttggtgggggaaagccccaactctgcagatcatggagagggaatctgagtgttagaaagggctctcctaggccgtctccaagacaaggagcagttttcaaggcaaagaaacagcagcatgaccttctaggtggagaggaatcatataagttctcctgttagcttctgtcctagaggtggcctcacttcctgcagagtgactctctgacctgcctctctgtgggcctggagtgccccgcactgacatctcagcatctgcaccagcccctgcctgcactctgagacccttctatgctacctctgcttgcctctcatgaggctgaccccttacccaatgtcatctacccacctcctgccactgctgatgggggaggggaagggacctgaccttcattaggcactcgtgtgtgccaggcatacgatgccaagtgatttccagacacgctgtcacattcactcatccattcaacaagtgttcgttgtacatttattagatcctgggtactattctagctctaggagatacaggattgaataaaacagatgtaagaatgtggatctcacatcctagcgaggtagacaaccaacaaggaaacaagtccaatatgacatgtaatatatccgatgatgttaagtgctgtggggaaaagtaccaagacaaggatggggaccaggaaatggcaggacctgttgcagtgttcagtaggtggttggggaggtctcactgagaagccggcatttgagtaaagatctaaagggggtgaaggagcatctgttcaaacatttttgaggaaagcccaggtagaggtgggaggatccttgagtcttcactgcagggacaactactgcggatgacctcaattcataggcgggaaaatgagagctctgagaggctgagcatcttgctcaatgtcccacaattatgatcccaaagcacacatgtcctgccataaagcccatgctgacacactttgctgcttcgcctggtcctgggttccaaattcctggcaagtcttcttgccctacctggggctggcccaggcctgtccaagccccaagggtgcgtctggtcaatggatcccctcccttctcttcctggcctgccccatgctctgtgctgacagctgatacagagctcacctcacctttggcagaatgacagtttctatatttaggcgactcatgaatctttctgggattctgatgaattgctgttttcctgagctctggctggagttgctcttccctgtgattcaaacattaatgctccccaaggtctttcctgcaggagttattgctggcgggtaattggatgcagagtttcctccagccactgacccaattcctcttggctcaaacctcaggcaggaatggaggcggcattggaggggtagagagctcaccaggctctctggaaacagctgtcccaaaagcacatgcacgcacacacacacacacacacacacacacttatacacacatggttatgcacgcatgcaaacacgactgttgcaggggcttgctcaaggcttgcttgccagcagctatgtcctgtaattgagccctttggaatcataacccacttgtcaagaattccttggagtcaggccctgtcctggaactgcccgtgggtgatcttccaaggcaaaggacttcagaatgccccttgccttgcccatgtctaaatttccctagtatcccattatcattaggagctggtcacttggccataccttctctctgacacactcctaacctccaacatgacaatctgggccccactctctctctttggccagctctctccacccttccttttgattcacgtgcctcccttcctctctgcttagcgtgtacatcttggttcttcttgctatttctatcatcttcaatgtattaaaagctgtttgaggtgtaaggacaacagagactaagtaaatccctagcatagaacctggacactggctcaggaggccccacatggccctgggatcctattctggaccccgagtttctggatgggcaccccctgtgccaggaggtctgtgccagatgtttgtctaccaatcctggtcatgtctggcccaagagctgggctttcccctttgtggactcaggcatctaggtaggagcagggaggggctaatagtcatgctgtgccatgctgagatttgcagaatattgaactttatgggagactctgacttggtatagtctaagtgcctcaatgcttataagagaaaaccaaggcctgagctgggtagtcacagaatggctcagtcttgggtcgggttttctaagcactgggctgtcttctaagggtgtgtgtgtgtgtgcgtgcatgcgtgtgtgtgtgtgtatgcatatatttgtgaatatacaggctgtagttgtttcaaagatttgttgagagggggtttgttaaggataggggaatctgattattctctaaatgggctcagcccacaaataagccaaaaaagcctttatttctgggttcttggattcctgatgtcactctgaccaagcactttctcactcatttaagaagcccagttccagagatagtaacaaggacatagctaatttggttcccctgctaacatcttcagctaccttttgaggagaggaacaaggaaaaaggtaaatggtaatggaggatttgccttttaatgtaaggacttactgaggcattccctgtagactaattttagacttcactttcacttattcattcattcaaccaatcattcactcagtaattatttattggagaccaattgacatattccaagcagtgtgtggaggcatgggagggtaaaagatatacattaaagaataaaagacttacaccacaatttggtgagcaccttctgtctcaatgtagtggacactgtaatatccagagacattacgcatgtatggacactgcactcattccaacctggactgaattccaggctgtgagaccttgtgctataatttataaagtacttctgtcaggcacttgtctaagtactttcctgaatttacacaattgctctaatcttttatttcttcatctggggaatggagatgagaattccttcctcactggtggttgtaaggattaaataggtaaattaatggttataaagttaccaacatattgcttgacccataataggtgcttattaaatgttacttcctttgctgtcttctctgctgtcaaaaagctcattgttggggggagaaaaagtctatgaacagagacaataagcataaagttgacagccaagttccaaaggacagttgggaccaagtactggcagggaaagtgtccagggcagtgaggagttcccattatctgggaaaattaagaaatgtttggtcccaccttgtttctggagtccctgaactctgccccctccctaactgcaggtgttattgaggtcctagcatgcctcataccacaggacccctgggtgaaggcaagactccctcccctagggcctcaaataaggccctcccctcctggcctcatccttgcagtgactggaaggaggtgggttgcagggaagtacagtgagagtccagaccacaggcagagcccagaacctgggcaaacagaatcccgctcccactgcactgcaggaaccgaacggtattgcataaaggctggctttgccgaatgcatctcgacaactcatcagagaatgtcaaattcagctaaagctttagcaagacaatgatttgtttgtttccactgaagagctcaaaaaagaggcaggattttaacttgttccaaagaaaagagcatcatttggtaacagactggaatcatagaatcacagaatcacaatatcttatgactggaagagccagcaatgtctgtctcattgacagattgtaacaattatgtgagtcagtgtacataaagtgccccctacagagcttggcacacagtaggtacacactgactgatcatatgttccaaaccccatgttttaaagatgaagccccagaccaacacatgacactcaacatgtcccaagccacctttgccctctgcacttccaccatcaccagcccctggtcccatcaaatagcactgcttcctcctacttgccacttctcttggtggcaccaccctcccaagttgtgagccagccatgaccaaagcccctgaggcagttgggactcctctcttgacctctgttcagtcacttgctaagtcacagaggtcctgcccctacagtgacttccagttctgcttctagcttcttagtactgccaccgtcacactagttgagttccttgtcatttctcacctggatcattgtcgcagcctttgaattgtttctgccctgcccccactaccccccacccggttcccttctccagtttttgtgtctcttctctccaaataatgttacctgtgatgctaaatatatttttccaaagggagctctgctgctacccctctatttaaaaatctttaatggctccccactgcctactgtattaagcacaaactcctcattctggcattcaaggtcttaacccaatagtgcgacaggctgactctatgagccatgctcagcaaaactagatgatctgctatttcccaaacatggactatctaccccatttgacaatcccaatcccaagacgtgccttcctctgcctctatttgcttaaggccaacccatcctttggggcctttcaaataccatttcctataggaagtcatccttcccatttctaaccagatgctattgtctgaatgttccctccaaagctcctgttgaaatttaattgcctttggaacaatattaagatgtggagcatttaagaggtaattacactatgagggctctgccctcattaaatgcaataatgccaatattgcagaattgggttaagttattcagggagtgggctctggataaaatgatgaagcttgtcctactttctttctctgtctcacatgcccacttccaccttctgcccttcaccatgggcacctacacttcccagatgctggtgccatgatcttggacttaccagcctcagaactgggagcgaaataaactttagttctttataaattatgcagtctgtggcattctggtaagacagaaaattggtgccaaagagtggcactgttgctataacaaatacatgaaaatatggacgtggctttggaactgagtaatgggtagaggctgaaataatttggaaaagcaggcagaaaaagcctgtattgctataaaaggagcagtaaggaagattctggtgaggccccagaagagaggagctgtagggaaagtttggaactcttagaaattacttaaatggtcatgataagaatgctggtagaaatatggatgataaaaggcattatgatgagatctcagacaaaaatgaggaacaaggtactggaaactggaggaaagaccaatcttgttatacagttgcaaagaacttggtggaattgtacttgtgtcctaggactttgtggaaggcagaacttaagggcaatgaattaggctatctggcagaagaaatatctaagcagcaaagcattcaggctgctgtgtggctacttttaaccacaaatagtaagacaaaataggaaagaaattattaatacttaaagacaaaatttacaaataaaaggaaagcaaagtgaaaagatttgaaaaactctcagtctggtcatataaagaacaaaaaagcatttttaggagagcaaaccaaaggagtggccaagcaacagtttgctaaagagactaatactgatagaaaaaagataggtgctattcatcaagacaatgggaaaaagaccccaaaggcatttcagaaatcttcaaggatgcctgtcccatcacaggcccagagctctaggagagcagaatggtttcaggggatgggccaggggcgctgtccatgggttcactgcccagagctgccttgggaacctgcaccccacattctagcacagcatttttctgctgccccagctatggctcaagtgggcccaggtgtggcttgacctgctggacggtagaagcaataagccttggtagtgtccatacggtgtgaattctataggaacaaagaatataagagctgtggaggcatggcttcctccacctagatttcctgccccactcaggggagtggttcaacctctgctgtgtctctttccttccaactgctctcccattgtccatggtgcttagacagcatttgaacaaaacaataaaatggggaaaggcactacctcactcagagattcgctgtgaaaattcatttagatgagactggtaaaccactcggctcagtgccttacagacagcaagccttcactaaaagttagcaattttggttacaaatgagaaaacagaagctcagaaaggctgtacaatgtacccaaataaaacagctagtaaacaaaggaatttggctttgaactcaagtctatttgctttcaaatctctccttttctcaaaatgccacccagaggtacattgaagatccctagcgtctcttgcagtgtttgagctcatggaggtgactctatgaagctccagagtcaatgaaacccctgctgagtctcacatccttctctgccatatatagcagagggggtttctggagaagacgtctatgaatgtgcctctcacccaccttctggtctcagtacattcctagccctcacggctacctctggtagctccaattctcctccagattccactgtaataacacctttaggaatgatattctttgtagccttgggtgggcctctcgggtgatgcccttttgtactttaaagtgctgtggccccccaagatgagtccatttatatcagagccaactgtgtccttgctaggaaggcagcagaggagagagagctttctggaagctaatgatgtggaaccaactgccctggaaacacgcacagtcattatgtgggaatgtgggagtccttccaagggaatcaagtgtagccaagccatccttttggtaaatttttctcaagttttactcacctgaaaattattttcacggaaatgtctggcagggcaagttaaacatgttgcagggagattcatgatctaagtggcaggaccctgattcacaaagactcaacactgagaagtttagatataagaaaatcatcagtgattacttatattacaaaaagattcacctctaaattcccttcaaataggaaatgatctcccattgttgtttttaaaacagatcattaactatttgactaggagatgtgagagtgggaggtcagacaaagataaaggcacaagtaggaaaaaaatctaccactgatggtgctttaggagagctctggaaaaatatccaggagaggaagggatttcatccttatggccctgtatctgcagcattgcccgtccctttcatgtaggcttcactgagacatttgcccagatgtttgtgcagctctctcacgtaaataccaagaagccctgtgcttcccagacttcaaaaacaaaaggaagggcaagaagggctagaaacccagcaggacagagcatgagaacttctttcatcaagggcttcaaagatcttacaggtcataaaagactaaagaccaggttgcccaagccctcatcagacacatttctacaacattctacaatattcccatcaaatattcactctacttttgctggagatcaggagctctctacttcctatagcaacatacttcagtttgcacagccctgatcaattggaatttgttcttgttgaacccaacatatggcacccctttcacttgacttagatctgccctcttcccctctacaggccttcagatgtgtgatgttgtgggcctcaacaaaggtaaactgatgtgaaggctggaattggctcctcagcctccaacatctgcatgttcaagaagatatcaaacccctcaatggactggtgatttgatgcatcacctctgtgagttggaggggtagcaagatggtaccgggaattagaagacctgagttctcaatcttactctgcccctagctttctctaacagccagtacatattaatattttcttctacccaggaaattttatcaaagccattggtttcagttgactagcaaattcctatccctagcccaaacttctcagaattctagacttgtaaatcccattgcttacttaatatgttttagtagtctcagaggctcctcaaactcaacatgtccacacttggtcttctggggaccaatcctacagaatggagccatcacacatccagttgcacaagtgttgtctttcaaccttctctgtcaacactcccccatccaacacattaccaagtcccattgatttcacctcaatatagctcaattccacctgcttttctccatcaccattgttatcatgtctgttatccattactcaactcaggcaccagcctcctgacaggtctccctgcagctcctctggcctacctccaatgtgttctccaaatcagagtggttccttcaaaacacaaatctgatcaagtgctcaagggctttccattgtcctcagactagaaatagaatcctttaacctggggtcataaccctgcaacatggcctgtgtttgtttttagccatctccaacctcatctcactctgggctctattcccttgggcccccttttagtaacttgtgcttgctccactccctctcaccacaaggcctttgcaaaccttgttccgtctgcctggaaagcccttctctgccctgctagcccagttaaattctcatccttcaaatttcagcttcctggccaatttctctcctcacacactttcatattactgtggccctctcccttttcacactggtcagaactgcgatgcttattttcactcttgtctaattatttgattaatgtctgtgtcctccaccaagtttgaaactgaatgataggaaggagcagtgaatctgtttttgctcatgattgcatcatgccccctgatagtatagtacttgctgcatgaaacttttccaataactagtagtggattggatgagtaatgtatcctatactcccaaatgatcatgtcctaaagttcagcttgtgaaggtaaagcctgcatttaaaattcaggcttctgggggcaatgggtgagtgggtgcaatattttccacgtatggagtggcctagggagccatgaaaatccacagtccccacccctgccacaggtagcagatggctatgccaaaattaaagcccagttctgccttggcagatgggcagctcacaaaacatggtgggaatggcagtggtgttcgctctgcaaatatcctaggtgtagggtgcaggccttagccccacatgcctgtccttaccccctaggagacaagaacaagcacaaacacagcacaggccctctggacagccaccttgccactagcagagaggctagttacccatcaagagggaagtctgtgggagcaatattttctcccatgcacggaacttcagagttcacgagaacttctcagccatgagctcttacagttcagagaactcagtagtatgatggaatgcagtggttctcaaagtgtggcccccagactggtagcctcagcatcacctgggaactaggtaaagatgaggattctcagggcttactctggtcctcctgaatcagaaactgtgaggttgggtcgtttcaacaagccttccagctgtcacttcacttcatgcaaaagtttgagatctatggatgtagtggaaggaatgtcagctttggagagaggcaaaccagagctagaatcctggctgctcctgtgcctggctgtgggcccatgatcccattccttaatcagtttggtcacagttttcttatctgccagaggggacattactcattactcccttccccatggagatactctgagactcagcatggaagatgtctggcatacagtacgtgctccatatatttcattttccttccttctttctacaaccccatactgctctatagaagatgaggcagactcccgagtctgatcgtatagagagtgagggggatccaggtttggggcacatccatctgactccttattcctttttccttagaccacccctgagagggagatagtcagaagcaggctatctggggtggcagcctgaatgtgtatggaacagcacagcctgactgacttgaggcagcagaaaacatggccaccacagaccccaggtacctcggtaccaagcttgcggggcctgatcctccacactgctgaagaggctgaaggcgcaaacagaaagtgagaccttggggatcggtgaaggcaggaggagctgagtgggagactggaggatgcatttgtcctggcccccttcctgcctcctggagggtgaataaagaaagtgccacccatggctgaaagttcataaggaaaacagaatgctctgaagcagtgagtgtgacttgtttgtagaagagacagccagtctgatggttagaagcaccggctttgaccagacaggtctgggttctaagccatttaacagctgtgagatcttgggtaagtgtcttaagctccttaagcataagttttctcattggtaaaaggcagaagaaacagtaccttcctcatgggactgccatgagaatcacattagcaaacttggatgaagctacaggcactgtgcctaacacaaagtaaggacacaatcgaagtgattccctttccccaacctcagcctctgttggctaattcctgtgttccaggcaatcagatgagagtagcctttgaagtgttgagctgctccattaacctggtgccatagaggccccacaagtgcctctgctgcctcagaggtctgctctgaagccaagtacatttgcttctggtagtccagaaagccttgaagacaaccaggtgaaagaatagaggcagacttccctggaaccactcatttaggaaagttcaaccagttctgaaaatcaaatccatggggccaggcacggtggttcacgcctgtaatcccagcactttgcgaggccaaggcgagtggattacttgaggtcaggagtttgagactagcttgaccaacatggtaaaaccctgtctctactaaaaatacaaaattagccaggtgtggtggtgcgtgcctgtaatcccagctactcaggaggctgaagtgggagaatcgcttgaacctgggtggtggaggttgcagtgagctgagatcacacccctgcactccagcctgggtgatgcagcaagactccatcaaaaaaaaaaaaaaaaagattccgtgtatccatccattcattcattcatcaaaaattcaccatcacttactctgtgagagatgctgtgtacatgctagagataccaattaataagacttggttttggcctttgcggagctcacatgcacatcttagtgggggcgcgatgggcttgcaaaccacagatctgctcctcctcccaggcatacagcaggatggcactgccctgcagtgtgacttctggccataagtgacttgctctgcccaatgaaaggaagaggcatgtgtccctgcatggaggacactttcagagcccgtgtcctggtgactatggaagctcatatggagatggagcctgggtccctgagtcacctgctgttgatctacataggacatgtaacgtgagcaagaaatgagcttgtgttgtattaagccactgagatttggaggttgtttcttctcatggcataagtcagtccgttgtgactgatccagccaccagctaccctactggccctggtgtctctgtccttgtggatggaccctcctctctccctgccccctactcctgccaaaagtggagctttctttatcaaaatttaaaaccctgagcaattaagatgctataaattgaaaagttctttccgacgaataaaattgttcttatttctaatgaatacgagatggcttacatgaagctaagcactctggtgattataaaatagctgacataaaatatcaacatttcttcttccactgctaatgtgacctattaaattagtactgattaggcatttttcttttgcaaaacttctttctccgacattgattctttgcacagttttcaaccccaagtttgatctggcctgagatgcttttctccttcttatctctttagggcgcattctgggcacttcttccaagtagctgtttccaaaaagcaaatcccgtgggtagcttgtgtctcccaatgtccaaagatagttctgagtttacatcactttatttttaaaagctcttcattcccatttattgttattttattgttttttttttcctgtgtaggactagagagaaaaaaaggattcacaaataagaaaaataccctactttttttttccaaccagaatgtgtagtattgcggcgcttgtggcagattgaaatgacttaatgtagttcccacatttacagcgatgaacctctctactattaaagaggcaacatttctcagtttgtaaaagctttctcattcattcatcaagtccagcggctgctgcctcccctgtctgtgcaatccgctcactcctctccctccttgcttctcccccctccactcagaccttcccatctcttccccgggaggctccacttggctcctgaccaatctcggcgctctcttcttgcttttccagtgtattctccaccttgcggccaagatcaacctttctaaaatataaatctgaatttgccatgcctctgtttgacatccctccccactgttctctgtgaaaagcctaatctggacatccctctacagtccagtgcctgcttttgtctctgtgccttgtgctgtacacccagcaagcaatgatccccacaaagatgccatattcttatcccctggcctctctgcacaggctgtttccccttactggaatgtccttcatttccccttctctagtgaacatttcttcatccttcagagccccactcctccttggagaatctccactctctaacccttcagggctgggcagacagcatcctgtgggcttccctacagtgctgtaacactgtccaagctgccttgaaatctattgcttgtctgtctcccgcattggactgcaagctttttgaaggccaggagtgtatgtcatttcccttgatacctccagagcctggcacatcgtaggggcttaaagaattgttttttcttttttgagatagggtctcacctgctttgttgaccaggctggagtacagtggcacaatcatggctcactgcagccttgacctcctgggctcaagtaattctcccatctcagcctcttgagtagctgggaggcatacaccaccatgcccagctaagttttaaacattttttgtagagatggggtctcaccacgttgcccaggctggggtcttgaatttctgggctcaagtgattcttcctgccttggcctcccaaagtgcagggattacaggcatgagccacaatgcctggcctaataattgttgaatatgagggactaaaaccattctttcatttgattttgatgacaattcagggaagtatgcagaggaagaattatccctaatttcacaggtgaggaaactgaggctcagggacacacagcccaaactatctttcaaagacctaatgctgtccccagaaccctgggtctggatgtctcatccctgagcactgtagaatggccaccaagggaagggtgagcatgtgcctcagccaggctcttccagaaggtacaggggcagggagaagagaagatagtagatggatttgcagcaagacctgcacccgtgtatctgacctggtcaatgctgaatttggatggctttgttccatatccaaggcatgggtggctggggacaacttgtgtccataagtggaataagatttccagtgataatcaccttgtttttccctgcaattcctctagagtaataatggggctaattcaggggtggggaagctcttcaatggctgcccaagtcttgggggaagggaagtccccaatccttgcagagggatcccctgtgttccactggcctctgatctgcttaatgaatccaactcattgaaaaccaaggaagagtttatgttgcatgttagagctgatggtcctccaggagcccgagatccaccattaaagaggagctcctatattactgagtaaagatagcagttacaatgagcaaaggaaacaagaaagaagaagtatgatgctgagaatcatggacttggccttggacaaaggaaggcagaaaaatggtcttagagaggagggcttgccatcagataaaggggacaccaaacacaagtcacaattggtggacaaagctgggagaggaaagggtgagctggaggtgggtgccccagcttcattcaggaagaggaagtcgggatatatgacccacattctgcttctggctcgctaggatgcagctgacacccatcagctgacagcccggtatgagatgagcacaaggagactgtctgctcacgtgcttatttctgaaccctcaaacccctcagtcttagggggtggaggctgctcctggaggaatcaatgcctgggaatctggtaacggtggagacccagtccagggcctagaatcattctcttacttgcttgctgaaataacatgtcttgaacacctactgtgggccaggtgttgtgccagtcagagccctagtctcaaagggggctggtctagtcgtctggagaccagtctagttcctgaccttactctggtcatggtctctgtgagacctgatcaaaactgagggccttttctccaggaaaaaaataacctagtgtgcgtgcacatacatacacacaaacacacatgcttgtgttctgtgtacaattcaagggggttcctagcttcccctgaaggttatccatggaccctgggttaagaatccctaggttaccattagttgcattgtattatattcctgataattgctaagagaatagattttaggtgttctcaccataaaaaagtttgcaaggtaatgcatatgttcattagcttgatttagccactccatgatgtgtatataattcaaaacaacatattgtacataataaatatatataacttgtatctgtcaattaaaaattttaaaatatgactgtcatacaaaaaaaaatccctggtttagatagagagacagacatgtaaacaactgtgtggtatgaaatgtggagctgtgaaatttggagtgaagtcatgctctttagggataatgtaaagtcttggcttgttattcagtcaacaaatatttatttagcacctgctatttgtcatgcacagtgctaggcaccagggacaaaatcataaataaaaccataaagtccctatgctttggatcttatagtccagttgacagggatggtggcatttgaactgagtcttgaggtcaggaaagaagatgggggtgggcacccaggcagagaaaacagtgtgcagtgggcgtgctatctgagttctaggtgcatgagctgataggcgtcatctctacactgcgtccctccaccaacctagaggatcagtttccaatgttcctttttgaagaggacagcccaacagaggagggccccatgcaggcaggggaagctctgtgtgtgcactcatacataagtatgaatgagctggcttactgccaaataggatcctgcatccccgacagcctccctgtagcagtgcccagagccatcaccagggttggcacagccaaagcactgctgaagtttcctccctcattgcagcccagaactcatcagagggagagctgtctttcctcacactggccagaattccaagtgcatgagaaatggaagctcactggtggctcggatactgaaggttctctggggcccaaggcaacctggcacaaatttggtgcctttacgcacagccattaatggggattggtggaggagagcatgcatgtagctttgaactcagcttcctcttctttaggctcaaacactatgtagcccacctggaagacttcactccattttaatggaaggaaaccagctccttccatccttccagtttcttggcatacttaataccccctgtgagatttctggcagatttgtggctggcagttagaggacgttttgcaactaccacaaaataactgttaaattaaaataaataaataaaaagagatccagaaaaagcatgcagacacgtctggctttgtaaaattactgtcagtcagccggcatatggattcctgaaaagttgggcagaaatcacaatgttgtcaaaaggatccctgaaacagatcccactttacctggcaggcttttgttcatcctcagaacctgttaaaatgtcccctgctttatataaagccgttttgggactctttctagtataaaggaacagacttttattgcatctctaccatgtgctagagactgggctatatcctacattatctcaaaccaccctccttacaaccccacaggtaggtattagtgccattttacagatgaagagtctgagattacaaagttaagagacttgtaccaggttctgcagctcacaggtgatgaggccagaagttgaatggagctcttacaaatggctgcagagttagctcctctgctcaaatggccctttcgttctaacgtatcattgtgggtcacaccaatttgtaatcgtttgttgacaggctcttcccttccatttggtggtcctccttgatgcaggggtgcagaaatgtttgtggaatgaaagtagaaatagattacagattccgtcagatacatttcatttgcagtttcaatctatctgtaattccttcttagattctttgattgtctcttagggctctctacataaacagcagagccattcccactttaagaaacctaacctcccctcaaatcatccaaggataaaaacaactggaaaggaatggccaggaaactattgaaacatttactataggatcttgacctacactcttaactcattgaaaacaggacttggccaacaatggttctatttacgtccaccttttagaaatgtacctgttcaaactagaaatccctgagcattccagttgcattcagttaaaggaggtaatttgttagctatgttgttagtgaccagaactatcccaggcctcacaatgaggggaaggagcatggtctgaattagggtaaccagacagtgcctttaggaggcatcatggaagcaggaggagcgccttgtacttctgctgcttctgtcccctcagctgggtccctctgttcctagcatgctttgaagccagccccacatggaggagcatctgacgtcccttgctggtgaggtgggtggagggaatagcttcactgaactccctccttactctacattccaccaccaccatcatcaccacctttccaccatcccccaactgctgggagtccaggaatcaccaccaggccttggcagggacttggggatgctgacttactgaaaaaatttctactgggaacctgggctgtgagaactgtcatctatttggggaccctctgacatctagagatcgtgcttcctgatgcttcctattgaccagactcctaactcctgatgacattaaggtacatcccccatatccggagcctgtgtgtttggagttctgtggcatgttcagctcagacctatgtttcactggaaaggtggtggccctaccaagcaagtctggttggttcaatgctctgctccttctggtctctgtggcaggcagaagggccacgcggctgtgctctgcttcacattttgatcatctccttcggcaattcagagaacctttggggagtttcggttggctgaggaaaaataaaaacctctttgttgaaaagcacttggccagttcataggatactaggagctggaagagacttggtgaccgagattaccatccaccaggggtcatgtctagtcaaaatgtcaggcagctgggcaggacctggagccataatattagagttctgagttcaaccctccacttagcagctgtgagctcttggaggagtcctttaccctctcagcactttgttttgttgtgtgtaaaataaggataaaactaatagcaaacacttatagaaaaacacaaaagtgtttataataataaacacttttaataacacttttattaaacacaataaaactctttatacagacaaaatcattaaatcctttcagcaaccctagtaataaattatggcaaatgtggtggcttagaacaacagaagtttattctgtcacagttcttgagcacagaagtcagaaattggggtgtcagcagggccccactcctgagggatctagggagagtccatctttacctcttctgacttctggtggcccctgacattctttggcttgtggcagtgtgactctgatctttgcttctgtggccttctgccttgcatctcaaatctccctttcctttctcttagggacaccagtcattggacctgggcatcaccctcaatccaggatgatctcatgctgagatcctgaactcaattccagcggtatgttccgtttgcacttagttccaaataaggccctattcacacacaggtaccaggggcaaggacttggagatatcttttggggggcacccaatttgaatcccaagaaacaaacgaacaaaaaccacacccccagcctgcttgacgaagggcaaggaggtcagtgtgcttgaagcagagtgagggagtgtgtggcaggagctggagtcagaaggtaatagtggccagggccagatcgtgtagaaccctgcagtgactttgatgtttaattcaagtgagatgggaaagggatatgggactttgagtgcagattgacaggatctgctttgttttaaaaaggctgcagtgtgacaagtaggttgagaactattgtgggttgaaggcataaacagggagacagtctgaaggttattgcaataatctagggatgatacggtgacagcctggagcagggaggcaggggtggaggagaagtggtcagtgaacatttggaaggaacagccaataggatttgctgacaagttggatatggactttgtaaaaaacaagaatcagggacgatgtcaaaatttttgacctgagcacctggaaagctggggttgctactgactcttacttacctcccagggttcttataaagaaccagtaagataataaatggaaagcttgtatgaaccccaaaggtctaccaaaatgctatttgttgttgttatcattattattgttttgtgatctgaaactttccagctctaggttgccagaagatgtcagactgggttgaaccaccatcaagaaaatcagtgtctcaattacaggagaatataattagttcattgtaattttgatttgttcttttttagtaccttgctctcttccctgcctgtgttgagtacatatttgagattcaagaagcctctctctctatcataatggacaaggcaacaccaatatagacagcaacggagaaaacagtggcaattttgaaattatctccttgagatccttgtcattgtatttttcagagccattgtatttaaatggggcagttgcaggctcttcactctgcacagtgtgagttaggtacacaatggtagactgctgttcctaaagaagtaaattcgttcccgcccaaactcgcccaggtttccaacaaaatccttatcactgtgacagttgcctgttgatttttcttaaaaaaagagaataatgttccatattggattcatgagtgcactggtgaattttcattacttctttggttcatttattcaaacagtgcacagctttcattaacaggaggtcgctattgttttcatcttccccattttacaggtaaagaaaatgaggtttggagaggtgaaactgatgtgttcaaggccacacagccactaagaagcaaagctaagatttgaagcccatctgccccactcctaagtgtaatccctcatactcgaaagtaagttctaaaagtattggtctcacagaaactaacctttatttttgccaaaacagtttttattaacttcagtgaggagctggaatcatagagtgactttgatgaaacagttttattactttcaaatgttatataaattaccaactaagatataaaagagtgcaaataatgaatatgaggggagttaatgaaaaaattacaatacataataagcctgcagaatgcaagcgtgtatcataaacataaaagacctttaacattacagtaattaattgctggactcagaagttgctgatgcatgaaaagaatgcttaatttgagagccctaaagtttagaaaaaggatactggttttaaaaggatttaccttactcgctgagactcaaagttctcagtagcagaggttatttcaaactgtttactcaaaaaacacagacactgtatctgcttttctatcaaaatctgggtgagcagaacccaaattaaaaagcacttattgtattcatgatgcatttattgtatctttcatcagcagttttcaactaagcagaaatggatcaccatccacaccctcttggtctattttcctgtggtttatatgagatttcaagatctgcattccaactgtatatgctcaatcatactttgcaccataataattggttagcggtagaagtcagcctctggttttgagtcaagacatgccacagagtcctggctctgttacctcctagctgtgcaaatctgggcacatcccttaacgtctctgggcttcggtttcctcttcagacaaattaagataacaaaaatacttatatcacaggactattttgaggatttgggcattgtatacgaaatgtctattatagcaactggtacattaaatagtactgagttaatggaggctattactacaattgagctacacaacccaacccctttactttagagaagaggaactaatgtttcaggaggttaaagcgacttgcccaaattcacctggctatttagggactcagatggtatagtataaaagcagaatgaaggtgtccagcctgcaagctcaatacctcatcaaccattatgttaacactgaagaacatctcttcctacatagccgctataaaaactcaccatctggaacatatcagtcaagaaaggcactgcctgtgagaggacatgctgaaatggacaaagtcatgaatgcctggagttccctgaaaacaccgccacctgagacttagggagggaaggacccagcccccagccttatgcatttaaaacggaactttctccatgacatgtggtcagctcccaaatgtaccagactctgggtcctctgtgtccttcatgataaactttgcaaatgtgactactgaacctgctggggatcatctggtcagagcagtgccacgttgcctgctttgacctggtttcatctgaagcctgaaacttctctagaggtccagcccctcaactccacttccatcctttgctgccctatttacacatctccctgcatcccgttggatacctgcctttcaggggtaagcacctaccaatccaaagtaagtggcctggaaacctgtggcctcactgggtttgctccaattcaacagtaaatttagggcagtaaaagacagtcctatattactaaacttccagaacttatcaccccagtaagtagtatagatttatatggaatttggcatcagcttaatacaagcaaatgcattaaattcattagacattcatcatcagacctaaaacatcctctatatatctcaagagtaatcaaccctatcactcctttgagagcattaatgaaagagagaaatttgcctgaaagatctactcaattctagtcctctgaaaccttctctggaatctcttatttaaatgaaacaaaactacaataataacagaagcgtcaatggaactcagactgactatgcctggtctgtgatgctgcccactggcattcataagaattagactcatctattttaaaatatccctttcttagagcaatatgttgtttttcagtttttgattgggctttgtttgtttgtcctactatttcctttatgacatgctattcagggttcaggagaatgatatattctcctcaaaaccagcactccagcctcttgggtgactatttttgttaagaagtttctggctacacataatggaaaaagtgacttggtgcacacggtaaagaattcttagctcacataagaaacctaacatgttttccagacatggacaacaggcagtacggggcaatgctccccgagagaagagaaacaaacaaatcgtaggtgagccctgtgatcgccctgccttactgccaggagaggttctaggttgtggtggagggagggagaaccctagctgagctggcagtcttcctgagttgaggtgacagagtaaaaaattcaggaaggccaaaaagctagaattcacaagataagagtacacaagaggaaagcaccagagatctgcagaaggtctcccttcattcttcatggagtactgatcactgtgtatgtgaggaaaccactaaggccgagggaagagccactgtaggtggaacaatctcctccagatcccacaagactgggaataccatgtgttctatcagccagagtggaacagctttgtaataaacactccaggcttcgggtagagtgctcagagggtattgcttcagaagtggggacaaattcaccataggcaagggctgtcctggccccatctaataaagcataaaagcaagggtctgaagcagaggtcagcaaacattttctgtaaagggacagagagtaaatatcttattaggtgagtgcaaaagtaattgcggtttttgcattgttgaaatttgccgtttgatatttggaatacattcttaaataaatgtggttatgttctacaccattttttttttctttgagacagagtctcgctttgtttcccaggctggagtgcaatggcttgatcttggccaactgcaacctccatctccagagttcaagtgattctcctgcctcagactctcgagtagctgggatcacaggcatgtgcctccacacctagctaatttttgtatttttagtagagatggggtttcaccatgttgtccaggctggtctcgaattcttgacctcaaatgatctgcccaactcagcctcccaaaatgctgggattacaggtatgaaccaccacccctggccttatacatcatcttaatgggcatttctcgctttattttttggctaatgacttattacttgctgtttattttatatttatttcagactatggaaatgatgttagacaaaaagtaaattcgagagattttcttatttaagctcacaatgggtcgtaaagctgcagagacaacttgcaacatcaacaacacatttggcccaggaactgctaatgagcgtacagtgcagtggtggttcaagaagttttgcaaagggggcgagagccttgaagatgaggggcatagtggctggccatcggaagttgatcatcaaagctgatcctcttacaactacacaagaagttgctgaataactcaatgtcgaccattctatggtcgtttggcatttgaaacaaattggaaaggtgaaaaagcttgataagtaggtgcttcatgagctgagcaaaaattttaaaaaatcatcattttgaagtgttgtctactctttttctatgcaacaacaatgaaccatttctagatcagattgtgatgtgcgacgaaaagtggattttatacaacaaccggtgatgaccagctcagtggttggactgagaagaagctccaaagcacttcccaaagccaaacttccaccaaaaaaggtcacggtcactatttggtggtctgctgccagtctgatccactacagctttctgaatcccggcgaaaccattacaagtgagaagtatgctcagcaagtctatgagatgcagcaaaaactgcaatacctgcagctagctttggtcaacagaaagggctcagttcttctccatgacaacacctgaccacatgtcgaacaaccaacgcttcaaaagttgaatgaattggattatgaagttttgcctcatccgccatattcacctgacctctcaccaaccagctaatgcttctttaagcaacttgacaacttattgcagggaaaatgcttccacaatgagcaggatgcagaaaatgctttccaagagttcattaaatcccgaagcatggatttttacactataggaacaaacaagcttatttctcattggcaaaaaaatgtgttgattgtaatggttcctattttgcttaataaagatgtgtttgagcctagttataatgatttaaaattcacagtccaaaaccacaactacctgcacctaatagaatgtatgggccacatgcttctgtctcaactgtttaagtcttctgtggtaatgcaaaagttgccacagacaatatgtgaaagaatggctgtggctagtgactgtgttccattaaaacttcatttacaaaaacagaagggggctggatttgtcctgcagagtatagtttgctgatccttgaaagaaaccaaattgtttctaagtaacttaattgcatcccaggacaaggcccccaaacatttaaaggaactgaaaaaatgataacatccaacaacatgacattcataacgcctgacagccaatcaaaaatggtcagggatgaaaaaaaaaaaaagaaaaaaagaaaaaagaaaaaaaagaaaaaacagaaaactatgacctgcaatgagggaaaaaaatcaatccacagaaatagacatcgaaatgacacaaataatcagtttagtagtcaagaacattaaaacagctgctataatcatatattatttgctcaagaagatagagaaaagtgtgtgtgagcatgctaaggagacaatggaagacataaaaaggacccaaagaaaagttttagagattaaaatatatctcagattaaaaaatgcactggttggaattaacagcagattagacactgcaaaagaaaagatcagtgacattaaagacacagtgataaaaactatccagaatgatacacaaagttaaaagacaaaataaaaataatggagtatctgtgagctgtgggacaatataaaaagacctaatagtcatgtggttggagtcctggaagaagggaagggagagaaaaatatttgaagaaataatagccagcatttttcaaaatttgataaaaatttaaacccatatagatgcaaagaaatcaatgaactgcaaatataaaaaacatgtagaaaatcacatcaaagcatatcaaaaccaaattgctgaaaagtactgataaagagaaaaacttaaatgaagccagaaacaaagacacattatatgcagaggaacaaagataaaaatgaaagcagacgtctcagaaatgaaagccagaaaacagtggagtgatagctttaaagtactgagagaaagtaactgttaacctaaaattatatatctggtaaaaatatatttcaataacaaaagtaaagatttttttcaaacatacaaataatgacagaattcatcaccagaaaacaattaccacatgaaatactgaaataagtcctttaagcataaaataaaatgataccagatggaagtttgaatttacataaggaatatgtgagtaaatataaaatattttttcttatttttaaagtctctttaaaagattattttaaaaagtagaaataacaatgtgttgtggggtttatagcatatgtagaagaaaaatgtatgacaaaaaagatggggtgtgggagagggaagtacacttttgtaagtttctgatactatacatacagtcgtataacatttgcttgataagttaaagatttatgctgtaagccttagagctgtagttttaggagtgctccctggggatatctgtcacaatgtgtggatgggtattacccacatctagtgggtagatgccaaggatgttgctaaacactctgcaatacacaagagaaccccccaccccctaacaaagaattatctggctcaaaataccagtagtgccagagctgagaaaccctgttctacagcaaccactaaaacagaaagcgaagagatgggacaaagaagtcaacaaaggagatacaacggaatcataaaaaatagttcattaatctgaaagaaggcaggacaagtaagtggaaaagggaacaaagaccagatgggccaaaaggaaaacaaatgagttggcaggtttaaactcaacattaataatcacattatatacagtggtctgcacatcccaattaagggcagagactgttagattgtattgaaaaatgcgagacccaactataggcaagatctgactttaggcataaagataaagataaaagtgaaaggatgctaacacttaaaaaagaagcctggagtggctttgttaatatcagacgaagtagatttcagagcaaagaatatgtgtattacaggtggaaagaggttcatctcataatgataaagaggtcaattcaccaaaaagatataataataataataaacctgtatacccttaacaacagagcttccaaatatgtgaagcaaaagctgataaactacaaggaaaaatagacaaatctacagttatagttggggacacccctttctcaacaatgtttataacacataggcagaaaatcagtgaggatatagaagacttggataataatggtgaaagggtgaatgatcttcccctacgatcaaggcaaggcaaggatgagacaaagtgtctgctctcaccacatgtattcagcattgtagcaaaggtcctaactagtgcagtaagacaagaaaaacaaacagaaggcatataaattggaaaggaggaagtaaaactgacttttttcacagataaaataatcatctacataaaaaatcctaaagaatttatttaaaagttaccaaaactaataaatgtgtttagtaaggctgaataatatgcaattgaaatacaaaaatcaattgtttcaatatagtataatgggttcactatataaacggttggaaattaaaataaaaaaccatttacaatagtattatattaaaactatgaaacagggatacattttgacaaaatatttgtagagtcatacactaaaaactacaaaacattgctgagagaaattaaagatcacatatgtaaatacagagaaatgccatgctattgacaggaagattaaatattgttacatcaattcttaccaaattgatttatagattaaatgaaacccaatgaaaatctcagcaggatttttaaaaaatagaaattgacaagctactactaaaaattatatggaaatgtgaaagacctagaatagtcaattttgaaaaagaacaatgttgacggacttacactgtctaagaaacttagtgtaaactataataaccaagactttgtggtattattataaatatagacatatagatcaatggaacagaaagtccagaagttgatctacatgaataacatcagaagtcattaaggaaatgcaaattaaaaccacaatgagatgccactacactaagcaccattataatggctaaaatgataaagactgaccatcccaagggtcagggaagatgcagagcatttagaacttttgcacatgctgccagggatgtaaaatggaacagtcactttggaaaacagtttggcaatgtctttaaaagttaagtgcatacgtaccaaagaacctacccattccacttgttaagtatttacccaagggaaagaaagcataaattcatgcaaaggcttgtacatggatgtttatagcagctttatttgtaggagccccgaactggaaacaacccatgtttccatcaacagcctaaaagatttttttaaaatggtatacctacacaatagaaatatgtctcagcaataaaaaggaataaacaactgacacatacaacaacatggagaggtctaaaaatcattatcctcagttaaagaagtcagacaagaaagagacaacattgtataattccattcatataacattctagaaattgccagctaatctacactgacagagacggatcagtagtttccttggtgtggagatggaaggaagaattaattacaaagggacatggggaacctttgttgggtggggggtaatggaatttttttctttttgggttgtgttgatgggttcacaggtatatgtatttgtcacaactcatcagattaaacactttaaatatgtgcatatcattgtatggtgatcatacctcaatacagccataaaatgttaaaagaagaagaagaagggatagaaggaggaggaggaggagaaagagagggaggagaaggaggaggaggacgaagaggagaacaagagggaggagaatgaggaggaggaggaggagaaatagccaccagtagggtggcaacaggatccacggccctctacaccctgttattcacagtgctggatttctcctaatgccccatgtgattacagggtagctactcacaatccgtcttacaaacttccttgttcacattggtaggaaggagagacagacttcacaaagctccctcttaagacagaaaccaatcccccagaatcatccagcaaacttctcttcctatctcatcggccagaattgtgctacatgccttttcctcaatcctccattaatcagatctaccccattattcagtggaagagggtgcttggatgttgcagaatttaactgaagctgtttttcactacaccatgaaaacagatctttctgttttctactccttccccacttcctcctttcctctttcttctctctctccctccattttcttcttaataaaaatatattataagcagaagctatacatggattcaaaagagtgcttggacatttatgaaagatggagctgtaaatggagacaagatcctgaggtcaggagctcaagaccagcctggtcaacatggtgaaacctcatgtctctactgaaaatacaaaaattagccaggcatgttggtgggtgcctgtaatcccatctacttgggaggctgaggcaggagaattgcttgaacccaggaggcagaggttgcagtgggccaagaccatgccattgcactccagcctgggcaagaagagcaaaactcagtctcaaaaacaaaacaaaacaaaacaaaacaaaacaaaacaaaacaaaacaaaacaaaacaaaacaaaacaaaacacaaccaaaaaaaccaagacagagtttgctctgttatctgctattaatggtgacatttatgaaggactattgacatcccctgctggacaggcagggagcaaggaggtgtggctgctctaagatccctcacctcctaacgtcagccattcaccaattcaaatcttgtgaagaagcaaccatggtcaggcaaaagttgacttctttattgtgtagcaaactcatattccatccagccccatgacatggtctgtgacttgattttgagaggagaaatcggaaagctgcctctctgatgcaatttctcataagtacccagatattagttaatattttataggctaaaaagtagtatccaattttctaattaacattttcttaaataataaagctgatatattgttttaaaaatacacatttttttccgccatgtgattaaatatagctatttttggattgaatggaaaaaatacctctggccatacatatttttacttttcctgaattggccattattcaagaaggattgctcaccacctgtggtctggagggcagaagcttgctaagcaactgaattgttcaccctgggtttcggggaaatgtttaacctacttgatagaactaacggatttgaaagtcctttaatggcaccatttacatgttaatgttctaatgacaaaggtgttttatctgttcatttgaagcagggaaaccctacttaactcaacttagaagcctttgttaacacatgataagtgtcaggaagtgatacaactttccccaggatgaatccagagattagggacttagtttgcagtaggtccctttctccaaggcctcgccaccctctcccagttgactgcctgagagatttgtgcccacaggtcttgggctgaataaagaatgtggaaaggagtctgtgctgccatcaggctgcctgggtggtcagagtctatatatagcgctctgctcacatccctccggaggctttaccattttcctgtaaatggctccaggactggtgctttcatacttaatggccagcttctctgttggaggcctgccctctgtctgctggaatctgcacccaccatgcagaaggctggaagtacctgggaatttacatccccctggggagcagtcctgaacccatgactgacaggtacagcatgtggaagtactccagctcccttgccacttattgggacaactctgagatctgatctaggcctggggatcttgttatgatgcagattctaattcagagagtccgggctggagaggaggctctgcaattccgacaagctccagggtggtcgctgatgttactgatctaggaccacacttggagtcccatgggtctacactgtcttgggaacatccctgtgggattatgtagtttctgccgctggtagcttacttggttgccttccttggcttggccatcttgcaggtctcaatttactactggccatctctgggaatactttctagtatattactttcacacgattccttgtctcagggtattcttctggggagcctaccctaagacaccagatctgcagcaccttggcagggggagggccgtattcaagatgcactgtaactgggcaccagcctccagggaccatccatgctcatctgccactgccttctcaaatcattctaggtgccagtcccatctgattatccatgaacttcccaagcctcctgactttttgctcatgcttttccacgaatctgaaattattgctttcacttttctgcacgctaaaaagctccttgtttttcaaggcttgtttccaatgccattctgaccaagaggccattgctgatctccacattcaaaagcagcccctcctctcttgtgtcttcctagcatgttgcttatgtcttggtttccctgtccaagtaatgggtacaccagtagttgcccttgtcactctcagagttgttgtgatgatcaaatgacaggatagatatgaaattgctcactaagccgatatgatgatgatgatgatcatggaggaaaaatacagcacctgtgaacttccatatgtagagtttttctaaaataaggaattacttcttctttttaaagatctatacatgaaatcttggatttgcagcactggaatgtagggaacaaattgattatgtacaacctgaagccattacatttccagattgggatatcaatctgttattcccagattgggaaatcaatctgttattcccagattgggaatctcttgctgttgacttacagtactgcagctcaactctatcacaccctgcaaaaccaagaccactggcaaagaaggtcaatgtcattgttctgacgctaagacacgtggtgaaacccaacttctgggatactcagagggacactcagggccatcagtttccctcaccagcacagtgagctgcaaagcctatcgcaataggcagagtgggaaactttggggaaagacaacaagtttaatgtttgccacttcttagggaatggtgacagcaccaaggcagaaatatctggagctcagcaggatgtgtgaagactggactgagagaggtaggaggtagaaagacgggtgtgggaacaagctaagtcgggctcctggcttgacaaattattattcagctggcttgcctgaattgtgacatattatttattaaaatggaaggaaaatttaaaaagtgagatgtcagccccaaccccaacctccctgagcacaggcagctggcacaaagcagccagcacaaagcagcctctgcacagcctaaaaactcaacatgacagcagtgtggggaagagaaagtcatcccacctatttagaatcatacagactcaggggaaagcactccatatctgcatgaccttgaacaagtcctctacccgctttacacctcagaattcttattataaaacagggataatcatatattagagggtcattgtcaggattatgggtggaaaagcattttgacaaaattcgattttgttataactattattgtgaatgaggatcatgatagtgattgggttgaaattgtacaaatttttatttaattttattttttgatcatgtatagtaaatggttactggccatcaacttttttacattaagaaataaaccctgtcctcaggaagttagcatgttatcagagtagacagacttataatccaataattaaaacatattactttgggtcagaggacacacacgatcatcttcactgtgcagacagggaaactgaggatcagaaggccaaatggcttgccgaaggtcatgcagctaggaagcagggtcatagttctggcctggtcttctgatccttcattctacctccagaatgactgccctcccctcctcaccctcctgggtcatagagtgggctgtggcactcctgcttacctgttgggtgagtctggatcatcaaggaattcctctaagcctcagtttcctccttttgccattaaaccacaataacttttgcaccaacctaataaaaatgtggcaattacacatgccctgtcttacctcacaaaggtaagattgtgctgtgtgccggataccccgccagtcactttacatatatcaaagggattaaggaagcaatgcttacatgccagatacctggcacagagtgagccctcagtgaaaggtctgagcaggttgagtagctcatttcatcgttcctaaaattccttgttagccctattttgcaagtggaacttggagaggttaaacaattgaatggaggtcacatagctattaaaagatggaactgacatacaaatcctgattttaaaactgtgccctttccaccttttaaaagtacacgagacgatgatgatgacgatgatgatgatgatgatgatgatgatgatcacttctagaagaatgtcaaggtaacctacagcaaaagatgctccagcctccttcggccaccaagaaggataaaaatacatggggtacctgtgaggcgtccttgcagttatctgctgggagcctcccaaaagtccagacaggaaggtgtagccagctgaagagcatacatagaattacaatggcctgtcctggtggaagcaacttgccattgtccgaggcatgaagctccaagtgcagggccatggagcctgggtcacggcaatggcaccattcacctgcttatgtctgattaggaaacactgttggtggtggcagtgcctcatgtcaggaacagctcaagtactaggcattcccctctgggcttgagacagagaggaactgtggaagaggctaaaattcaattctagcaggtgggaagtggctggatataaatattttaagacaacaaatatgattcagaaagctaattggaactcgctgacaccaccaagggctcctggcagcatgacacacagatgggagtaggaatctccgcctcggcattagaatacatactgtaaataccatggaggaagctgtctgtcccctccagggacacacgtctaagtcctcaatagaaagctggtacatgggacagggagaggaaaggtggagaagatgggcactgaacagcagcctggctttttgtcttggatttgtctaatttcctgagaaagtcacttaacctttctgagcctcagtttcctcatctataaaatgggtagagagtgaaggtggtagtgggcagggattagactcaatgatctttaaattgcctagctctttccctgctctggcactgtgagattccaggaatctatagccacctcttggatttcatgtttggttgttgagcagcaagatagcttagggggtttagcacctggactctggagatggacagcctgagttcaaacatcagctctgccacttattgcatggtactggcaatattacccgtatacataggtaagaggggccctgctctgggccccacactttccagggtgtttctctgatcctcttccatctgtacccttccttacaggaagcaagaggacatgtccaccaggcactcatattctcaaactagaccacactctgggtccctggaattctctgcctaaatgactccaagccagctgacagggcccagatgggcctcacctttgggtctatcctctctagggtggaccttggcattgatgaatgcaccctctcctcccaaggggttgcagtttgatgtggagtgtccaggggttggatgtgtgggctggggtatccatgtgcatgcacaaaaactcccttacagtttaagacacagctaaaatagaaggacaattcgggagagctgtgggtcagggacccctctccctgggtactggttctggtctgggattcctaagagttgcagaattctgaattcaaaccgggctttgtagtcattataaaggtctatttttcaagcagaatgatagaatgtatttaatttaactagttgttggctggattcaaaacttgcaaatatttagatatgtgttacatgggcttccactggcactctcgtcctgggcctcacagatgttagtggggaacctggctcctgggaacattatttaaccttgtaatactgggtttcctcctttgtaaactggaaataatattaaaactaacatcatagacttggtgtggtggctcatgcctgtaatcccagcactttgggaggccaaggcaggtggattacttgagctcaggagctggagaccatcctgggcaaaatggtgaaaccccatctctacaaaagatactaaaaaaattagctgggcataggggcatgcacctgtagtcccagctactaggggactgaggtgggaggatcccttgaactcgggaggtccagactgcagggagccatgtttgcaccactgcactccagtctgggtgacaatgtgagaccctgtttcaaaacaaaacaaaaaacaaacctaacatcataaaattgttgcatgggtcaatcagttgactcacataaactagtcctatgctcaattcagtagggcattagctgttgttatttttctgtcactcagacctgggatgatacccacaaatgccctgcagacttcttggtctcccactataatggtttcaacctgtcctgccaccctgcacatggtgactgatccaggtagcctgactacaacactgcctggcatactgttaccttttgaggtcaccttcagcctgtgtagcacccccagcctctgttctctgctgggagctctccaccctggggaaaaaaaggactcattccctgtgtggctaaagccagcaaatgagacatgtgcagtgagctgtttagagccaaaggaaataggcaaataaaggtttcttcaaatgtcaccatcccagctagggtaagatgcatgggagctaaaatacacaatcttcttcttggtagcaaaaaaataagtttgaattcagggatcaggccttgaccatgtcattaaccgtcctgcttggagacctggctcatgataacaagctggtgggaagaattgctcttttgatttaaccttgctatctgtcattaaacagccttctgtagtttctctgatatgcttattttatttttctggcatcacgccagttaaaagtaggataaatgataagtctgttaacgaatacctcagttaattttatggcagagattgcagagcagggagcaggtgagaccattcctgcactgtgggctgataaccatttcgggcatcaaacatttattaaggaccaataataaaagcccttgtgatggtgtaatggctcattctaaatgcttcctgctaataaaatgagcattgatttgaaaggcaatatttaaattccatccacagcatgtcaaggaaaggacaactgtgtctgacgcgtgagaagcacttagccaacttgtttaatcatcagatgctctgtaaattgtgtgtgctcttggcaggtgggaaaatgttccctaggaaatgcttcattaggggaggtaaccacagagcagggttcaaatcctagctccctacatttgggctgggtgactttggactgggtacacaaactctcttagcttttactggctcctgcataaaacagagatattcataactttcatgtgctgtggcttggggagttaaagaagtgattacataaagtgatacagcagcatcaatacattttaagctcctttcccctttcccttaagcttgaacatggccctgctctgggtaaacacatttctagcttcaggtaaattactgtgccatgaacaaagtaacaggctcagaaatcgatgggctcctctctcttgtaaagactacttcctatgtgtaccttgatcgccattccaacctggatacatgtcacatgtccatgctaatcttctgattgttaatatagcgaacttgatcatgacattcacatgagaacagtctttcagtggtcctgaggacaaaatccacacaagccagcactgcctctgagacctgtctcctgcctccttgcgttccctatcccctggagcctcaccgtgcccccttgctgttccatgggcacttaccattccagtcccatgctctgtcccagcttcctgcctttgcacatgctgttccctcttcctggaatatcttccaccacttcttcctgaatagctccttttacccttaggggaagctgaggggtcctctctagaaggacttcagtgttagctttctctaacccccgagcttctcttcgctagcaataactgcattacactgaaatggctttttcttcttctctcttggactgaaggcgagtctcacatctgtctgtcaagcagccatcacagtgcctggcatcgagtcaacattttatgagtttgttgactcagctctcattccttaggaaggctcatccagtctcagagatttaaaaacaatctgtatgctgaggactcacgaataaatctggctcagcccactcccttaacctctctacacacagacacccaactgcccacttacaaatctcactcggatgttcaagcctgtccaaaactgagatcctgatgatccttcccaaaccggctccttctccagtccttctcttcattgcagatggaagcttcatctttcattgttcagaccaaaaaatctgatgttgtccctgttacttcccttacatcctatatctggtctggctgtgattctgttggctctagcctcaaaacagattcagaatatggccccttcttatcacccccattttcaccttgattattgcagtagctgcatatgggctatctccctgtttgcttccacccttgccccctgcagtttattcccagcacagcagtcagagtgatcctgtgaaatgacatcactcctctgctcacaatcctccaatgactctccatcaccctcagagtaatgctagattccttaccactgtgataagggcctacagtctggctcgtgctacctgccaagctcacctccactgttctttgggaaccccaggcaagcccctgctgcagggcctttgcattggctgttccctctgcctggaatgctccttccccagagtcacatggctagcttccttcctccaggtctttcccagatgccaccttctcggagagacctcctctggccaccttacctaaaatttcacctcccaacacatattcccttctcctgatttatttttcttcttagcacttgttcatcatactgtatgttttacttatgtatcttgtttattttctatctcctccaagcagtgaggacatggattttgatctgtgtgttaagttctgtgtcctctgttcctacagcagtgctcgatccacagtaggtggtccattaaacactagtttgttggctcaatgaatgaacgaatgtcttcttcaggggagaagccaactccggcagccctccagtagcctgggactgagggggaggtgggactcaactctggaggcagggacttgactctagaccagattgaagactagctgaaacagcaaagaggcaaaagcacctctccatgagacgtgcccaccaatgccatgtcagtttactgttgccatggcaacatctaaacgttaccaccccctttcatggcaatgacctagaagttaccaccccttttctagacatttctgaataactcaccctttaatttgcatgtaattaaaatgagtataaacatgactgcagccctgcctctgagcttctactctgggcacactgcctatagagtagccctgctcggtaaggagcagtatatctgctgctgctgctctatgtggccacttcaataaaagctgctgtctaggctgggcatggtggctcacacctgtaattccagcactttgggaaactgaggcaggcagatcacttgagcccagaagttcgagaccagcctggggaacatggtgaaaccttgtctttgaaaaattataaaaacaattagctgggcatggtgatgcatgcccatggtcccacctactcaggagtctgagctgggaggattgctggagcccaggaggtggggattgcagtggaccaagatcatgccacttggtgacacggtgagactgtctcaaaaaaaaaaaaaaaaaaagaaaaagaaaagaaaaaagaaaaaaaaaggtgccgtctaacactactggcttgcccttgattccttgaattatttcctgggtaaagccaagaacccatcctgggctaagccccaattttgaggctcacctggcctgcctgcatcagaaccagcaggtggcacaaacaccaacgatgcggatgggctccacagcgagcagcgagtagtctttggccacatgagcaataatggagctaactccccacagggacagctgcgggttcattatgcgtgatgagtttgggagggagaaaatgggctgtttggagtcactgggctgctagaagaaggaatggttttctctctagggaagattttgaataggatttcagagcaggaagatattaagtgtgagatgggaagcagtgtgtgtagggctcagagacctcatccccctagagattgtccgccccatctgggtgcacagtgtggccagcaggtcagcacctcccgtgggggtccatcaaggggtgcagcagggctcttgctggacttggcagctggactaggactttgcacaaaatgtaaagcaaagtatgcacccagaagcccattcttccattaacttatagatatatttaaaaactagataagagttgctatggagagcgaacgtgactttaagacataattgcagttcattgttattttcctaaataatgcgggtgtctacatggctccttcctgctttatttagcttcatctttccagctggagcttgctcctggatgggtgggggtgaccttcattggcctctctctaccctgggggatggtcatgtccttcaggagtgggtggtggataggctctgtctttgtttttctccggggaccaccctgctccatggacacataggatagagctgggcactcactcctctgcgtcctgctcacacagcacttcaaacgccagagagaaaaaaagcaacaggatagccctttgattcagcgagaaaggtggcacgtggtgtctgctccagtgagcccagaaaatttgcacgtgctaaaccagagacacattggccccttttggctaaacacctaggagcccatggcccctttcatccttacccatagctccactagtgcctgtattatgttgtgttagaatccatgtctgtctcagaagcagcccgaaggcagggatcacatccagtggatttttatagccccaaagcttagtcctgcctctggcgcataataatgcatctctgtgtaaaaccatgtgctttttcaaagcttatttttttaggcattctgggtagcaattcctctgatccacccagtctggggttccaccctgagtccagcccacacagttggaggactgactggagccctcataagaagaaactggacctctgtagaatgatgcgaagaaatgttttccttctctccccacgtgcccactcccattaataaagaagggaacttcctccagcacttctgtcctcttgaagcgctgaggctggagtatctactcctctgcccgcctttttattccactcaactgaggcgagatgctaatatgatgggggaatgaccatcagtggcctctttattctcggggttggcaatgttattaaggagtgggtgatggactctacctttattatttttctgggacctgccctgcacatagtacaggctcactcctcaggtccctgctcatatagggtgagcacactggagtgggatcctggctgcgggtggcttgccactctctctctgagtatgtggggcaggccagtgtctagctgagtagggttttcacaatgtgactgccccaagcaaagtccaagttctaagttaggggagaaggttattagatacctatttcgtccttaggtaagtcatgttccctaatctggctcaggccaaagccctgcattttgggaggtattaaacatatacctggcctggaatcaagctgctatttggttggcatctagctcgtgatccttgtgtctattttctaatggtgagacctggaggagtggtggagtgaggcttagattcctcttacctctgagagttgggctttcagagagacctgcactcagtcatgttttccctcaccaatgtggggtctttctcttaagtctggttattgtctggtcttttgtctcatgaatatcaaaatcccctagaaaaatgtagcctgtcattttcccaggcaggccctacttgtctctccccttgtccagctctggtcactacgttcttgttacctgcaggctcagcccatgtccagctgctaagtcagtgagaagccagcctggcagagtatgaggagcccttcatgccatctgggcaggatgagaagatcagctgctgccacccccgggagtcaggcagggagacagcctgttgtggatatttgttgtgtctactgcctgatatccatttcaccctgctggtaactagtccccagttttcctcttgagggctcgcctgtcccacctccacccatctcatgtgcttcagataaagttgactctacccagactccaaaagtggcaaccatgagtaagccacactgaccagtgcatttcatcctccagccaagttgggtcagacatgagcatgtgacccaagtgaggccaattacagccagtgaaactcaattctagcacatgtgtgtgtgcatgtgtgcatatgcgtgtgaacatgtacatgtccactattagagaagtgggctttcatttccactggatgtgaagctgaaaggatgcagaatagggaatttttagcagccatcatgaagagacagaagggccatgaatgaagccaacactgaggaagcagagccagatggagagacaaaccttatccaggtgacagcatttgatccctgggttgagccatgcctgaagtcagaagagtctacttgaatggactattcagttacatgacctgataaggtctcttgtttacttaagaaagtttgactggcattttctcacttgcaaccaaaagtgccctcaccgatacagagccttttgttgccacctgatcaccatgcagtagcctctctaaaccttgctctgtggagtctgcagtttcctctctctgttttcagttagccagagcccctgctggaaagagagcctggccccacaggccagatgcttggctgggctctcttgtcagtcctcaaagccaccctgtgtgccccttgcatcacctgattctgagaacagcacagccaataagcccctgccttgtgcctctggaaatgctgccagcctggatcagtaattccaaaaatatgttctggggaacactggtccttttggatgctctttgggaggacaaaaaggttttcagttttagaaattgacaaagccctgtacatatatatgtatccttcttggagatccaccagcaaatttacttatcaaaggttctaataagcactgctataaaacacagtgttcaacatatcataatttagcatttgaaaacagatttcactatggaacaaacacttttttggttgtaggtataatacctataacaacctgaacatacttggggaaacgcttgactagaatttgcaggagttccttgaacctggcaatttgtacaactggcctcttgctggaggcagccggccattcagttctggttgggtcctgacacctttatcttggcttggtgatatgacatcatttcttccctccagagctcccggcatgccgcagggctgggactgcgctggctgtgccgtttcttggcatacggttcccatgctggtggtagcaggagataatttgattgggctgacaacattcattcttctctgggccacaaagaccccctaattccccattctgagaccacggtttggatctggcaacaagaatgcacatagttacatgtaaacagaaagctcaacactaaattatgattgatgtttcaaataaaatgctctcagggtcaggatgggagatgagtttccaggaagtagcacctgtaatgaaactcaccagagtcataaaaatgcaggatggccacaggaggccacctggagactcaaacctagatgacaggagaagagctaaattttaatatttgtttgctctcaaaacagcagcatcatacttcccacgaaacagaaatgcttgcttggtatcatattgcctcataaatcctcgggacccatttggtgatgaggtcgaaggagccagctggcccaggtgtgattacttctgggattggagggagggagggagagggaaggccaccacttgttggctgctctgcattcatgatccttttcagtcttcctaaaatccagtgaggtaagcagtgtttctgtttggctggggaggaaaccaagatccagaagggtgaagcctttggactaatggaggcactgggatttgaaccaaggtcaacccaaggtcaagccaagcccaaagccatgcccaagaagggatttcttactgatgaattatgagtataggcctctcagatgtggttggtggtgtcccgtgactctgcttggatggggctgtcttccgctttctatccccagacaagcactcagctgtgtgtccaaaccaaggcagagtatccttccatggccctggtctctgattggggaagggaggctctgaggggatacaaataaagtggctacagggtgaagttccagggttacccagacacctctagattggagaagctgtttttaaactgatcctggatgagttactggagatcagaattgccagaagatcagcaggctggtttgcccctaggaaacatcaatatttttgttcgatttttgagtgtccccacaatggtcattccaaggtggtagtggagagctcacgggatggggagccataggatcctccttctggctctgtccctttctagcagcatcactcccctgccctttttctgaggctttgtttcctcatctgtcaattgtgtttaataattcccgccctgaccatttcacaatgacaatggatgtgggttttgattaaatgcaaccaggatttactgagcattaactatatgccaggcaccctactcagtctgaggagaagggcttataaaggagaatcccacaatatccccgtccttaagcgattcatttagtgcgaagaggacggacggaagtggtgaacggcgctttatcctagcgctttctcattctttgtttcatttaaagcattgatggctgtctgaagtaagcagaacaaatattcttattctcatttgacagatagaagaagctaaggctgtggcaagtaaagtcacttgctgaatgatgataataacatctaaagtctatacccacaattcatttgcacagggttttcatatgtgtcatgtcatcaaatcttcaaaacatccctgcgtggtaggccttattactattagacctgtattgtagacaagaaaagaaacagggacagactgtcggttcctggagagaacaaaccagaccatcttcatctatgtattcttagcaccaagaatggcatgaagcaataaaagcggcttgtagcagatgctttcagtgtcctgcccataccgccttggacttaaccattttagtgcacactggccccgtttccaaccatcggcacctgcatttctttatccaagggctctctctgacagccaagagccaagagcacttgttggccagaagtgctagaaagtaggtgcctctcaggagttgctctccaccaaagactccatcacccttcaggtgggagaactccaagtgcatgctccaccctggctcctggagatcccagtgggattaagtcccaatggcccatggtgccaacttgattaataatgtacctggttttggttgtttttcttacctgtcttatttccctgtttccctatctgtgtttcttgggatcatctcccaaataaactacttgtccttttttcagagtctgcttctagaggagccagactaagactggtttcagtgatggcttatggggtgagtggatgagtgaatggagaagtgagaggctgtgtcctatcccctgaccccctgactgggggaggtaaagggaagggtgttggttataaccttgatgtgtttgtttcatggggactgaggtgggtttgggaaggtgcatcttacctgctggtgttggtgtgaagatgcagaggaaaaatactacaaatctgttactgaaggttaaagtcaagaacatgattccaggtggggtaatcaatctacaatgcttaaatcccctcccctggccatctagttcttttagaacagaatgcaagctccttactcagggcttgccaccctccccaacccatcccagactcggtgccgcagtcctacatcttctgctccctgaacacctggagcacttccctcccttgggacaccttcattcttgctggcactttgcctggaatgctctttccctcagagctttgcttggcttactttttctttttcctttaggtttcagcttcaaagtgacctccttagaggttggtttgctgaccaacaaagtcagtcactccctatctaatcaccttattctatttttatcataaaatttgtatttgcagaatatttgcttattattattattatatttattattattattaacttgttctctatgtaaaatgcaggatctatgaaagacatgatcagtcttgttgactgatgtagtctcagccctcagaacagggcctggcacatagcagatgctcagtaaatatctgttgaatggaaaaaatgaaggataagctaaggagatgacagtgatgggcagaggtgtggaggagttccaattgtccatggtgccgacttgattcatagtgtacttgtttttggttgccttcctttcctgtctcatttcccggccttctctatatatgtttccagggccagtgcatttggctgccttctaatgctctggtgtgtatttatttggatcagctgcttgtctttatgagttggtggcaggttatgtgaatggcccaagatcactcttagaggtagaagagccagaactcaagcctcgaagcccaggaagcccatgctgttaactaccatcctacatgacatccgttagggtttactcactaaccctgagctaagactttctgactctttctcccagtcttctgccatgtcacagagatagaggctattattctggttgctgggatatttaaaactttatttataagttgttccagttttgttttttgtcaacttatgagcaagtctataggtcagccatacaaataatttgtccttgtgggggaaaaaaaaacccatgttgcataaaaaggaatgtcccaccttaaagcctctagaccatggtttttcagtctcagcactattgacatttatagccagataactctttgtgacaggggacagtcctgtgcattttaggatatttagcagcatccttgacctctatccaccagatgccagtagcttcccctacttatgacaagcaaaaatgtctccaggcactgccaattgtcccgtgggggccaaaactgccaccgcttaagaaccactgccttgagctataggaaggcaggtgccatgtttgttttgcttatgatcatatccttagtgcctgacccaagttaagtgccccataaatattggttgggcaacagcatgaatacatgagtgaatagtgaatgaataaatgaatgcatgaacatagccagtgtccttagactgagtttcctgaatcccctgacctcaccagctgctcacttcctctgttttccaacatcacgtcatctgctgacctaactgaccagtcacagctctggtgtaattattcacctggcttcccataaactatgtccaaatagggaacaactcctgacttggtctgttttggtcttgagcacagaatccagaaacctctaactttaaccccgaagtggaagagggaaaagagacagagtgcaggagtgtaagcagcaaatgcccccacccactgggggtcatttacagtctctgggatccaattaacaaagaaagtttctgagtggccactttccccacgtcgcccatgtttctccacctcacagacaccagtggagccagtacccattaggcaacattactctgcataatgaaacaactgtactcaaatccagaataagaaaatgggaagcttctatgaagactttaagctgctcaagttcactcagcttcagctaatgaaaatatgagccgcctctgagctgagcctacttcctcatgtggtccagtaaatatcttaatatctccagattccttcctgccttctaaattgtgtgcatcacatctgacatttgcaagttatctatgatgtctgcaagattaaaccagcatgaaaactctccatctgcactctcatcccctccaccccccaacccaggctgccaggctgagctagaatgcctgagactgtgaaagctcagcccatatgggtgagactggaggccagctgcagacctttgagggtgcaattccccaccatctctatttgcatcgcacatgctgagggatttaatttcaagtcctggctgagtgagcaccttctacttagcagggaatatgggggcagacaacgaggagggaggcttggccctgccctccaaaggaaagcctcacccttcataacaaagggcacacccatcgtgtgcaggaccctgcctagatgctccctatataccctcccaggaattcctcaaaagaaaacaggcgtgggcgggtacccttgtttcccacttgagaaactagtgggctttgagtcagtcatgaagctactacttagagggatttgactcaggctagactcttcccagagccagtatgtggctttcagtctttgaccaggaagacagacatttgatgacttagctgtctatagcaaggcaggatgaaagaaatgccaaataaaggtataagcaatgccctgtcaggtacagagaaagaggggattaattcatgtggtggacttaatgagtccaggcttgaagaacaaagaggattttcagtagtggaaaatggggacagttccaggggtgacggatagcatgtgtgacagcgcagaagtgtgtggcccttccacggaccaaggggtttgtggagagagtagttagtagagggatgaggctgaaggtgatgcagctgtgtattggacccagcttgcataagctcaggtgagctgtgctcacctttcccaaattggtgtttggtgatatcatgttgatggcttcaagtcagccatggagggggcatttacatcacggaaatgggcactcaggactcctcccctccctgaaagctggtcgttaaacattaaccagcgcacgctaggtattgggggacatcaccaccaaggtgaccccagggatctgaggaaagtaaaaatgccttatctgaataaagataggataaagtaaacatctctttaaatgaaaaaaaaaaaaaaaaatcaaagtgaagatctgacctgctggggattctcagcagggaaacaggcagagcaggcagccccgttcatctattcccaatattgcattatctcagactcacttattcagaattctctcaccacagatcagcagtttgcctcctccattaccagctaatccagatggacctggtgctaacttaatttccaggataatggagtcctgatctgtttgcacaattggctcttgcatcccgaaagtatttgctgaatccttaaaatcaatgaggctgtgctagaccaccataccctccttcccagtgaagacgggttccaggatccccctagtgcctggctgcctacattaaacacctacagtacaccagctccatgctgggtgcctggtgtggatcctatcgatcctcactatggcccaggaagggtgacttccattttacagaagaggaaacaggagtctcaggaagggcagaactttgcccaaagttacacaggtagcaagcgccagagctaggatgggactccctgtctgtctctaaggctcccaatctttgaattacattttgttactatgagtggtaggctggataactgtctgcacagatatccacgtcctaatccctgaaatcgtgaatattaccttataaggcaaaaggaacctgggaaatgtgattaaggtaagctccttgagataagaagattatcctggattatctgggtgatctcaatgtagtcctgagggtccttgtaagagggaggcagaaggacatgtgaccacagaagaggagatggcacctacgatggaagcaaagattggagtgatgtggctacaatccaaggaatgtggcggcccctagaagccggaagaggaaggaatgaattcttccagggagccttcagaaggggccagccctgctcacaccttgatttgagccctgcaagactcctttcagacttctgacctccagaactgtaagagaataagtttctgttgttttaagccactaaactcgtgacagcagcaataggaaacacacactttccaaagcaagaggaagagaaatgaatcaagacatcaatatgagaaaggaatggggtatgagaagcatgtgtcaagggcaagaaaggaatgggctggcctgcaggtgtccttggctctctctaagcacaggaggtctgagcaggggcctctgctccctcccctttcccttatcctactcctcctagccacattgacttcaatttgaaccaatgcattctataattaggacaagcattcctttgccccctgatggaagaaaaggaggtaactgagtgatagaggccagcacaggctcaagcactggagttctgtctcagctctgccagccactttctctgtgatcttggataaaacactttatttctctgcaagtgtcgtgacttctcagatcccgcccccagatttttatatctatgtgctaagcaaactaatcgtataaacacagtttgggtagaatattgagcccattaaaagagcatccaaaacacactctgtgcagattattttcattcagcttttatgaaagcaggtcttgaggctccttgtgttggcctctcaaagctgcaggctggataacaatcccacagggggaagctccaatgcacattaatatgggaagatttctctggctgccagggccaggaggtgggcatagactggtcctaagaactgaaggtggaaaaaaaaccttgcttggaaagaccagaaacaagccctggtggttcgtagatctgaaggctctgaagatgagcttgcaggaacaagaggggctggcaatttcagggaagagaaggaaatgatgatgggttcagcagtgggtgtgttagtggccagaactctcagagttttcatgggcctgttcttttagccattggaagctgggccttgcaacaatgatgagacaaggcctgggagtgaagctcagtggctgtagcatggcttaactgaaagaccatgacctaggttcctgatagcttagtccctagttcaggtcctgttaccatcgtcctgcggtctctaagtgtcttaaatgtttcaactttagctttctgatctgccaactgggtgagtgataatagctctgtggagctggtgagctccccttctttccccctttccccttctttccacccaggctggatgttccagctgccaatctcaccgattcttagtttgtgtctctggaaaatggggttgctcatcagaaggttgacgcaaggtttaatgagacaggataggtaggtggtccaagccctggaatactgattctctccctggcccctctgggcattctcacaagttgagagaataacaagatatgatcaataacccagagatatgacacccagaggtgagtgtgctgctgttattctttctgaggggggctgagcctatgtggcaggcgatccttgatggtataatgtgcacacttccctgagcccacctggttgttctgccaagtgtggggttaagttcttgtccatctctcgtgcccagggtagcatggcatgcacaatgactgggacctaaatggcaaaaagcctgctatccaagctcagaaacatccctggctcccatctgaggcctctgccagcagctctgggaacccagcaataaattagaatgtcagcatgatatggggtcaggtgctacatcccaccaagactacaccctcttacttgtacccttggctgtctcctccccaagatgctcctctttttcagacacataatacaacactgggctgatggcctgaaggctgacttctcagtggctgcagcctcctgggctgacttctaagggaataggtgaatctgctcatcctctctgtcctctggagctggcagacattgtgtatgtgtggatgaggtggtatattagagctccctggcaccaggctcctaaatctatccctttatccttcaattggtgctggttattgtgtctgggaagcataccatcatcttcaatctcaaagcctaaatcagagtgcctcaaactttactgtacatatgagctacttggagatcttgttgaaatgcagattctgatgtgataggtctggggtggcctgaaactctgcctttataagttcccaggtgatgccgatgctgttgatcccagagtcacagggacctaaggggtcacctggagggaatgacagaaaccacagagctcaagaagaaggaaactaaaattgcatgtctgctgcatgccagctgctgtgctaggtgggtgaaagtagccaccttcttaatcctcccaacagacttgccaggaaaggattaggattctaattgcacagaccagagaacagaagctcaggagctacagacatacacccagagtcacacagctggcaaaaggaggcaagggttgaattcttgcatctggctcatgctcactttctctactaagaggcttccctatacatgaagacgaagccctgtcacaattcacaaatgaggaaatacaccaagaagtaaacatatggaagatgcttggtctcacactcttcatccaaaatgaaaagcaaaacagtgtgaaatgatctctcaccagtcaaaatagaatagatactttaaaagaatgattgcatgtggggaaaagtattgtaaaatggggattctcatacgattctggggagagggtacatttgggcaactgattggaaaacagatggcacctatcaaatgccttaaaaatgttcctgttcagtaattatgcttttgggaatctatcctaaagagtcttgaaattatgtatcctagcactatccaggataaagaagtagtagaaacaatttaaatatctgacagaagaatgagttgtaatttatgaaacatccacacaatggagttttatgtagtcattgaattatgggtatgtaataccatgaaaatgttaatgttataaaggaaaaaagtggcttgcaaaatgatacacagagaataatctaaaattgatatttaaaaaatctaaaacattaagcctagacagagaaaaaagcctgaaagaaattaaaccagtatattagtggttaggttttgtttctggaattaggaatcatcttttaaatgcattttcccaaatgttttaaatatacatgtggcttttttttttttttgagacggagtctcgctgtcgcccaggctggaatgcagtggcgcgatctcggctcactgcaggctccgccccccgggttcacgccattctcctgcctc[214 bp omitted]gtcccttcaaataaacttaggtctacagcacttaatccaatgacctaaaattcaaacgtacactaaaattccataaactattcctattttcttattgaatcacatgataatttcaggagacaagtgaccttcacttctgattgaccattgattggcagtagtttcagtttctctgtcctcagcttctgtgattattaggtcggcgcatcaacctaataaatatgtcatgatgtctaagcaaaaactctaacgtcatctagagagtgatacattaacgaaaccgtatgagggataatccattcattcagctggctgtgctctatggatgctgagatggaaggcagtttgcaagtggcccacagtctggaaggggagagaaaccaatcaactcttgctgtctggagtgagcagaggctttcagggctgatcagcacagagtgtgctgaagcggacttagaagataagatgtcctgaatgacgaggaggtgttaggcaaggaaggaaggaagctgatccaagcagggtttgcaaagacttgaaggggagacattgacattgagagcatggtggtttcaaagagccaccccaaagtgtggcctggcatgagggtgctatgcttgggggaggaaagaaatgagttgggaatggctgggatcatcagggactatagatgccatgtggcagggttttcattttatttgaaaggtgatggggagccccaagagggttttaaagaggagaggatcatgacagaattagactttaatgaggatcactctggctgcagagtggaagtgagacggtgggtggttcaattgatagtgtgggtgagcatagagagaaccagtcagggggttgtttgaataattgaggtgagaaacagtgaaggggtggccatggagagagggaggcagttgggagggagatttaggtggtaaatcagtagctacaggtcttgaaaattaattggatgtggagggttagggagagggaggaactcccagtgactgtcagaatatttgtcattgctaatttatgtgtttttgctggcttgaatgttacagtaaattaaagggtagtttgagtgaacaaaatataatttagactttgggtttgtgtgatgagagcccctgctcttggacagcaaaaggccctgtttcctagaggcacttccttctgatggatggttaccccaaatggatgtgggatatgaagggtggcaagtgagagagctataaaagttcagtggtttctgggaagctctcagggatgtaaggctgaacgtctttctgcaggagaccttccctcaaaaggcaaagagaatcgtgatattgtgatttgcttttgtatatttgtgaaatgcacacacacacaaacacacacgcacgtactcattttgcagatgaggctctgcacgattgcgtagtctatttcccatcatgacacttgttatggctgagcgagcccggagcctgagtctttgcctcttgagtacttgccctttcccataggctgtgctgaacgcctttaaacattctgtgtccaccactcccccggagtagcaccttgtaaaccaaagaaaggaactgacagcttgggtcgtagaaagagcccagactaactccagtcagagctgaatccaggttccctctcatcctggtgactctgggcttgtcctgtttgaacttcaggtttcttctctataaatcagagataacagcatcaccttgtaagcctgggaggattaaatgagataatgcaggtaaagcaccaagtacatggtaggtactccatgcctgtttctccttttctttctctgcggagacttttagagcagtgaggctctccctctggctcatgggtgtgctaagtagcagctcccctctgggtcttgagaaaagggacccaaaatgacaggtccagctctgtctggcattccacactgtgcgcagaagccctcttggcgtaacccagccttgtgatatttctgtatagtagtatggtaatttctgcagcaaaacctcccgtaatggcaaagacaaagtcttctttgctacgtaatgcaattcatgcttttaaatgtttttatttaaaataaatcggccgtgctgttgactctggcacagaactgtgggctgtgttctcagtctgcccctctgcagtgcaacggctgcctcggagggaagttcacatcccatccctgggaatctagaagcctgggtggggcttctgatggtggcttcctgatgctgcggggcaggcccaggtctgaggtgcagagaattgggctcgacatgtgctctctcctgcttttgggaaagccctctgactgttctgctcagctgacagcctgtgttctattcatctgagcattctcacatcgagcccagtgcccggcacagtggaactcaaagtctgttgggtgaataagtctccgcttcaccttccctaagaagtgagtaataactcctgccttgaaggactgcaatagagatgcagaagagaatatgccaaaggctgtgcctggttcataggacatgcctattaagtgggagcatccactatcattcttatcattattataagttgagcattgccggggtgggggtgggagcaggagcatgactctatcctatggtttgtggcagcagcatgcctcacacacagtaggtgttcagtcaatgagactggacttaaaaacccattttcccttttgcctccagcagggacggtaaatccgatcaggttgttgctcggggcatctctcttccctcctcactccttccactctcctctccttaccacttcaccccttcaggggacacagtgataacagggcgggggggctactgtatttgatgactcaggatctgccacgcatgttttccaaccacacccgtggaagggagagctgaactgggctgggcgaattatttttggtattttctccagctattctgatctctaacattttgcagtgggtggttagagctggtgattttcctttcttttgtgcaaacgagaccagaataaacagcatagggtgagtcacttcagattcttagtgcttcaattacttaaaaactccagggcctgatgaagcttagaatgtcaccttctccagaacagccacaagcagatgggaaatgttccatattctaagtagttgatggcttcccggcacaggaaatctgctactagctagctactagtgcccagagagaagaggaagaaaggcaaaccagcattcagaaggcagccccccttgatgccaagcactttacacacattacttcatatcttacttcagttaatcttcacgatgacctgatgaagtaatacacttaatgcctatgaggtaataaataacagccccaatacatatttcctgcctccttggtagacaacaggtccactctcagcatgttatatccattatctccttgaagccttccaacaacactatgacagtcattgctgtctcctcttcatagatgaaaacaccgaagctcagaccagcaaatgagaaaaccaaaaattgaacctgagttcttctgcctttaaagcccgtagtcttaagcccctgcatttcccaaactgtgtcctgcgggactctggggtcttctgagatgctcatgggtagtatcagagatgggggaaaagtttcggtggttcaaatggcgtgggaattttggcttgcataaaatcccgctaccagagtgggcacacaagttccttttgaagggccctgggttgtctatgttagagaaaatcgttggctctgttgagcctagtcaagtctgacttgctagatcatgcaagccatttgttcattcccaggatgttctcagggtcccctgggctctgcagagcagggtcatggacatgccacattcttccctgccagaggacccacagaacagtgcagatgtcccatgggggttaagtctccaggggaaatattcaatcaataaaaagcagcatttaaaaaattactgtcatgaaaaaggaacaccattttcttgactacccctgctaacgtctaacagtcctgctaatgtctcatatggcactgttagtggaagagacacgaagaaaacccctagtttaactctagaatagagaccagagcctttgccccaccctggcctccccaactgatcttccagcctgtgtttacatgcctccagggatagggagttggctacctcacaaagcattctgtgctacatagaaaacagctgttggaaaggccttccttctattgacatgaaatatacttccagcagtttttgcacagtggccccttttgcctctgagagctctaaaaaagtgtgaaggccactgtcatttcccctagagtctcctgttctccttgctaaccatccccacttccccattgacgtggtttcccgccccttgggagaagtgaatacacctggaaaggacaggagactcgaggctttgggtccaaatcctggatctcctaactattatagcatctgtatgaccttgggcaattcatttaatttctctaggtttcaatgtctttatctatggaaaaatatataactgggtagaattttttgaggattaaataagttaatgtatacaaagcacccggcctaattcctggtcaatacatgttattgatctcacctctccatctctccacttcctccagctttctagtactctcctctgtagaagtgtgttactatcccccatgagatgcttaaagaattccagatgtagggccaggcgccgtggctcatacctgtaatcccagtactttggggggccgaggcgggaaaattgcttgatcccaggagtttgagaccaggctgggcaatatgatgataccttgtctctaaaaacaaaaaattcaaaaattagctggatgtggtggtgcacgcctgtagtcccagctactctggaggctgaggtaggaggatcacttgagcccaggaggaaaagtttgcagtgagctgacttacaccattgcactccagcctgggccacagagagagaacttgtctcaaaaaaaataaaataaagtaaaataaagaatgccaggtgtaggcagacccctggagtggacagtggcttcaattctttcattctagaagccagttctaggcctggctctgttgtaaatccaaatgagatctgggccaagtcactttcccactctgggtttctgtttcctacatctgaggaacaactctgccattctggggtgcttgtgaatgttcaaatacccttccatattaccgaaaaataaaaaattaaaaattcagcaaatgatctggctttcagaaacaatggtataaaacatttttaccccaaacaaaagaggtagaatcttcaaggaccaggaaccaacatgaccgttgtttttgtttcctgactgacttgaacatttgagtttatcttcaattgacctcagaataataagaaatctaactgatgagagtttgtgtaaagattttaggcttctaaattctgctcctacctggcactgacaagaaaaacaaagttatttaagatgtttattttaaagaggacccaatgaaatgaattcactcctttcagatctgacttcataaaagagccataatgtgcattatgaagaatttactaattgggctttttatagaccaaataatttaatttttgtttgagctttaaaatatgtttattgtacaggaaaatcgtaagatactttttttttctgaaaggtcatcttaaaggtaattatttagaatttagatttagtttattcatgaaaacaaagttataaatggtgatcagattcccctgctagcccgatagatgtttaaaccattcatagctattgatcatttatacttcaccgatgattgatttgtattttcttattgttactgccttctgtggtcctcccatcatgcttcagggctctattttgaatcgagtgtgtttgggaaggctatcctggaaacttaactattccctaggattaggtgggttctctgtagtgcaacaaagagagagtatggtggcttgatacctgggatgctttttgtagttaaaagggaacatagtgactgggggaattcttgtgtctttagtcacaactcatggctttccatctactgcagtaacagttaagcaacaaaactgatgaatagttaaataaaatgtaatatatccatatagtggaatattatttaacaatgaaaaatgaagtactgatatatgctacaacatggatgaacctctaaaacgttataagtgaaagaagtcagacacaaaaggtcacaggttgtatgattcttataggaaatgtccagaaaaggcaaatctacagagatagaaagtagattaatgaatacttagggctgtggagaatgggcagtgacagtaatgagcatgggtttatttagcagggggttgttctaaaattctgttactgtgatagatgcatgtccttgtgtatgttactacaaaacattgaattgcacactttaaatgggtgaattggcatgcaaattatatctcaataaagcttccttaaaaagagaattaagcagagcaattgagaggatatttgtctcttgcctctgctccaacaagagctttctccactcccctggcttaatgctggcctgctgttcacataaataaacaggaatgtttgtagcatggggatttgtaatctagtcaatatatttatatgtttcttaaaagagagcatcttgtgcaaaatactattcaatgaaactacagtctagcagtactcaatcaatcagttcatcaatcagccattcattcattcctacaacaaacttttcctgaccacctagtctatactagatagccagttcacatcaggaatccaggatcacacaagggaaaacaattctaaccagaagcccagtttcttaccaggtagccttgttctcactagggagtcaggttcacatcagggagccgggttcatactaggaaatcagattctcaccagagagccatgttcagaaaaacgctttgatgtactaaaaggcctaattaaccctattttagatgccaacctgttctcacagaactgaaccaaaacacagacaaccatctccttcccccttttctttttttttctttctttcttttctttttcttttttcttttttagaaggagtctctctctgtcactaggctggagtacagtggcgtgatctcggctcactgcaacctccgcctccagggttcaagtgattctcctgcctcagcctcctgagtagctgggattacagatgtgtgcaactatgcctggctaattttgtatttttagtagggacgggggtttcaccatg[137 bp omitted]tttttaaaggaaaagtcaacaagcatccaaacatttgaggttatcaaccaaattaattagtgtactttgtgaaaagagttccagcatggcttcaaaaagggaatctgactggcgcatttaaatatttccttatataatatttggtatcaagccaaagagctttgagacaaaggagcctaaaatggaagtgttaaggtcaccaccattacggctctcttagaaatggggtggcagtattgcagagaagacggacagtgcgagtgaagcgcagcaccccaaatcttactaggagcctcctccatgccggatgctttgctaggacctacatggggccgggatcacagagagtagagacctagactctgtcttagagggacagggtttgctgggagaagataagtcaaagggcaatgaagtcctggtcacagacaccagatttttgcacatgacattagaaaggacagggatctgcaggcacctccatttgatttcttttcaaggattttactaatagaccagcttctgggaaagggctctcattgtggactacatgaggcttggacacgttgtctcaatatggaaaacaacttcagatgcaagccaagaacacagggtcaggtgttgtgcatgtaagcttggcaaatcctatcataaaaccaatggggctgtgttagaattggcgttctctctgtcttgtgttaattattatgcacttgctttctgggctttgaattattcatgaggccagatataaaatacgatgattattggtaatctccagctgtggcacctgaatgtgcagagacgccacatctgtttctgaaaactatggtctgggctaaggaacttagtgtgctttggaggagcagaaggtggcagagaggggaggagagtggtcagaggagtgagatcaagaggagaaaggtaaagtgatgttgctctcagagaaggtggaagtgtgtcgatcaacaaattggctaaaatatagagagcaagaatacggatctaactagaaggaagagctggatcaatatcgaatgaatgaataaatgaatgaatgtatgcatgtggaaacagggaggaggggaggaaagtgcctcctttgagccattttatcgaattctcactgccattcaatgaggcaaggagaaaatggacgcacaccttgttccatttaatcctcatgacttatgatatgggcatttgcatcagtgcttgacagtgttggcagctggggttgcagaagaggcctgcagttgctcagttattaatggggacttcagatcatgttgccctatacccactggccagacatgatttggggtataggtgggcaaagctataagtatcaggtactactggtggtaggaagtgatccaatgccttccttccctgggagaaggagtaactctacagagaatgctgccagactgagtgcccagtcccttggacagagtctgatggggagctgatagatgcctcttgtctctccacccactcccatctctgctgctcttaatgggagacctggcatagaaaaggcacctcctgagtatgaacaggtcagcctttttgggagggcagaccagcgttctatcaaaatgaaaaacccttgatggctttgattcagcaatcctggggaaatcgttgcatatgttgaataccaagcctgtgctgtggcaatgtttgttatagcaagaaactgaaaacaatccacgagtgcatcaacaggtgatggttcagcacaatgccctgtacagagaggtgagatattgatcccatctctgccatttactgtctgcgtgattggagtaagttactaacatttctgaatctcagttttctcgtctgtaaaatggggatgataacagtaacttcctcacagggttattgcaaggattagtatgtgtaaagtgcttagaacagtacctggcatctagtcagaagttagtaaatgtgagtaattaacaatgccccacaaatacaaaatcattaataagagtaagccctctgatacctaggttttgccctctggcccagtggctatctagtcatttctgctcccaaggggtcgctgaccccatggaggttagggggactgggactgtgccctaatcttacagctcagaaagtgaaaagggtcaccagatcagtacagctctgagcagccagccaaggcttgggtgggagccaaactatgcaggcagcctgacctggctcctggggctaaggcaacactggccatagtctttggtctcagccaccagcagccaggaaaggtgaggagatattggaatttgtgttccctggcaccaaaggaggccatggaagagacatttccttagcccagtcactaatatggttacccaaaaccttcctaccatcatcacattagactttctttcctctctcatttttttcattcatttatcaaaaattgttagctctcctaccatgtgccaggcagtatcataaagattctaggcactcagagacaaagatgtctcccatcttttgaggcacttgtggtctactaggaaagacaggcaagtaaacaaataattacttgcctgtgtgaaccccacacaacaaagacatcatctgctttgttattggtttccagccttagaaattgcctagtaacaaacccaattggtttgttattggtttgttacttgttattggtttgttattggttttcagccttagaaagtgcctagtaagtagtaagctcatgctaatatttatggaatagagatgcccaataacataatctgtacaaggtacagaagtactatacactaactctgttatgaaggcaagaaagtcttagaaagtgatgtataaatagggttttggaagatgaataggagttttttaggttaacacagcctgcagtttaagatgtctataacatagctaaaattataattttgaggccacagaaaatcactatggtgcttgttctcagattaatgaaggcagaagccagcaaggaaaagaggttatgaatgtctctcctcttcttgaccccccagtcactctcgtcatttttttcataaaccttggcgcaattatatataatccacttatctgtttatgtgttgtttgggtctctgtctctccagctcttgtaatggtgtctgacttataggttagtgctcaataaattctcactgagtaaatgaataaatgggaaaaggaagagaaggaaagagtgggccctaagtatccacagccaggggctctttccctgcctgggtagatctgagacagtgctgtccaatagaaatataaaaagagtctcatgtgtaatttcaaattttctagtagtccttaagaaaagtaaaaagaaatgataaaattaattaatattatatttttcactcattacatccaaagtaatgtaacttcgacatgtaatcaatatacaaaaattactgagatttatatctcaataatattattgaaaaaaaggtcaataacttttttttcaagcctttcaagcatttgaaatccagtgggtgttttttatttagagcacatctcagttaggattggccacagttgaagtattcagtagccacacatggccagtggctgcttggcagcgaggcccaaggcctcctccactctgttgcccagcatagactgtcagtggggcaggcctgggcttagcacagaacttgccaccctagttggaggggcactggaggatgtctgatgaaatgggaataaagtcttctagaattgtgtcatttacccttttgccccttctccatgtggccaccctggtatgccacctcttcttgtccctggcatatggagacattcccaggcccctcctgcctgcagctccagtacctatgtttctcttttgtgctctccccttcagcttggggagaatttagcatttccacagggatttgcattgatcaagtgtgacagtgagacccagttcccttggacatttaaaatatcaggacaaaggagagtgaggaactgggctgtaactgtgaagccaaggacacctggatgctgttagacctcttcaactgtcctttccaaagcgaacctgacctccaggccctgtagttaaggaacaggtggaaagtaccacaggccacagtacttaagccatcccaggcattgttctaagagctttgcatatattacctcatagaagccacataaaaacccaatctgataggtgctcttattgatcccatttaacagataaagaaactgaagcacaaaggtgttagacaatttgctccaggattcagctggtaagaggccagcccaggatttgagctcagaccatcttgctccagagtctggcccttacctgttgtgctctaggaaaggtgcatatgtgactctccgggaactaggaagagacagagatcacttctcactgcaggggaagaaggaagtagagagatgagagaggagagatgagagagtatggggtccagcagataggtaggaactttgaaaagggacttgaaggaatctacagagatgacagggacagtgtactccacatggggtccttgcttttctcctctgaggcactcttagtgttgtcagcacttggacagagctagaaagcctcctgtgctgtcttattgtttgggtgtaatttcaaaacccagatagaacgagagcttaatgggtatgaagtctccttttgggatgataaaatgctctggaactagacagtggtgatggttgcagaacactgtgaatatactaagggctactgaatcgaacacttgaaaaacgatggtgaattttatgcaacgtaaatgttatcacaattgaaaaaaaagaaggggggtaagaggagatgcaactttcaccaggaagaaggaagaaagcaaagcccatgagaagatgaggctgcaggtcctcccgaggaggcaggcccatctgcacgagggtgtgtcacatccacgtgcgcatggcacgtccatgtggtgtgagtgcgtgacatccatgagacacatgatagccacacaatatgtctcccactcatgagtgtgtagcacccaccatcccaacaagaagtcaagtcagtctgaaaacttctagcatgtgagagtgattgtgtatcactcggaagagagtatgagtgacaactcagccaggctgcgtcacgtgtgaatgagctggagtcaaatgttgacatcggcctcctgccagttacaatctacatgcacttccactatccttccctgtactggagccaaggcctgttggatccaccagctctttccattaccccacccaggctcgtgcctccatccttccaggaggaaacaaggacacaaaggtggcacacctgcctcccaagttcctccctgtcctccaggagctggatctcagagctgctaagacagaagccaagacacttgcatggggatcctgagctgaggttggggaagagaaaggtacccagatatgctcagcaagttaggcagagactgagaagtttcatccagaggaggagccattcaggaagtgggcacaactagcctcgacatttcccttgagactggaaatacaggaacacgtgagactgtttaaagtggggtggtttggacaaatcacctagcttctctgagatggaaagaggtgtaccaagcaagaggagagctgagatggaggaggggataggaaatgcggggggaaagtggaatgaaaatggaacagagctgataagccctacggaaattacaaatagccttcctggcttatccagggttcattcgttcaatcattcatttgtgtatttattcaaaaaacaccactgtgctgagagctggggaagggtctgaggacagatatgaggaatgtggtctgagcatggggacaggtagaatccagggtgacaagtgccctagccgatgtctgcactggctacacgcagggcagagaggagggcaagtgtttccacctgtgggaggacgctcttgggcaacatttcagggaagagaaaacgcctgagctggaccttgaaaggcagatgtgtttttccatgcaaaagggagagggaagatacagtgtgaagagcattctgggaggggaacagggtgagcacacacatggagacatgaaacggtacagctcatttcgggaattgaaatatggccggagcctgggacgcatgggagccaataaatagacgtctccttgttgctggtctagctggctgaccttggaacaagctgcttttccagttttgagcatgtctcagtctgtacaatgagcgaatcagattagatgtttctcaggggactttccagccctggctgctcctggagggagtgagctccctatcaaccaaaatattcaagtggagagcaggcaaccactggtgggattctagcctttgatggacatgtgaactacgtaaccttgaaggtcctttccagacctgagttgtcctgattctgggattctggagcccagatggggcctgtgaactgtgccaggcagccaaggatggttatgcaggacatctgttccctcccctgcatcccaggtgagacccctgctgtttcatgaaagtctgatgtacacacacaggctggccattgaatgattcattttctggggtgaggcacaggactaccttccactctgcctaataaatggtcagaagcccccatggggctaaaagctggcagctggccactctaaagtgatagaagccagctatgggctctgacttctgctatattaactcaatatgtattggagcctctactttgctgggctcagaagttgctctggtgagactgtcactctttggcagaagccaatgctcagtgacaggtaatgagctatccaggacaaaaggaaggtgacctgcccaccagtcagagaccatgaccaagggcaacacctgccaccacttttgtcttggtcactgctcactctggctgcagaaccagaggcaagtggtgtgaaggtacagagcagggttgtggactgagggggccggacttccagctcagctctgccacttcctcagcttgggtatgtggaagaaccatgtcttctccataagcctctgttttccttgctgtaaaatggggataatcatgactgtatgtaccaaataaaataatggggtcagtattgtgtaagctgtcacacacagtgcgaagggggtaagaaggggggtaagagaagatgcaactttctccaggaagaacgaagaaagcaaagcccatgagaagatgaggtggcagggccttccaaggaggcaggcccatctgcgcaaggttaatgctgggctggggttaatggtgaggttcccacttcaaggtgatacgcaacgaaaatacgttctatatggtttcaatataggcgtctttaaaaaattattgatttaaaaattattgatttgtgaatgactttgcaggaatatatctcttgtatcttgtgcttgggagagagaaacagagaacctttttctgttaaacagaggaagaactaataagctgcccagctttgggagcctaagacagggctctcttgtccttagggagctgagcatcgaggtgcaaagagctggacagaggagttgtctcaggatcaaatgtcaacctgtgtgctaactatgctgcccagcatgaggggagaggtgtggcaccaggcacgttctcgctatcagggtcaggacatggcatcaactggctaggtgttcatcttccctgcctttcagagtaaatgtatctccatgcctcccaggcctaggcctaatatctgtgggagttggcaccccttggagagggaattccagattgcgggtacctggagtctggtctggggaagggggaatgctcatgggcatggctcaaggactgctcatgctatacagaggtgcatggctggatgggggccggaatggggccccgtgaagcatggggtctgggtcctagggtgtctggttgcccctagcttgtgacggctttctctcctcatggctggaccctgttgccctgtccccaaggcatttgctgaagtcccatcccagacttgatgggccctcactgctgatccccacctccaaactgacccttaggtgctgagttggagacccatcagatcgaggcctgatgggtcactgtgatcagggttctggaactgctccctgaccccattatttctcaggcctagagaaataggcctgggcagaggagtagcttcccagcctgcttctctggttaggatcaagtcttgcttcagcatttctcaacaatggggtcttatgctttgctggcatcactctgccagcaaaacaatgtttgctcaaaattgagatgagcaatggggagggggtgagcagggagcctgtcctctcctttatattcattcattacttttctttttatccaacaaatatttattgtctgtgatatctccagcactatgttagatacttgatctgtgctcttcacagtttatgctgacacactcctaaataaatttggaaccttgggatgaactgaatgtttgcctcttccccttcaattcatatgttgaattcctagctccggaagtgatggtatttggaggtggaggccttgggggataattaagtttaggtcaggtcatgcgggtggaactatcgtgataggattagtttctttataagaggagggagagagaaacttccttttcccgtgccatgcaaggacacagtgagaaggaggccctctgcaagccaggagaagagccctcaccaggaactgaattggccaaaatggatccttaatcttagccttcccagtctccaaatctgtgagaaaataaatttctgtaggtaagacatccagtctatggtatggcagcctaggtatggtatggaatggtatggtatggtatggtatggtatggtatggtatggaatggtatggtatggtatggtatggtatggtatggtatggtatggtatggtacggtatggtatggtatggcagcccaagaaaactaagacacacctcaaacatttataaacagcatctaaatatactttgttttgtatttgtgctttaaaaatattttcactacaacttcgggctgcaaatttcccttgttgagtttatgtaaattgtcaatcctacaacctaaatggtaaagccatcatcattgtcaggccaatcagccaattcagaatctttttcagccaaaaagtctgacattttttcaattcaaataaacccattaatatgcatctctgtggccacttctgaacgctaagagaggagagagatggacacaggtaatgcagagtccttggcacctggctgccctcttcagtggtgcttgtattgtgctttgtcctgggggtcttcttcctctggagcgatgcattcttgtatggcccctttggtgggcaccaagagatgcccacccctcagggcaatgtcccctagagggagtgaggcctgtctttcacttgtgaagtgggggaagggggctttggaagggagacctgagaaggcctgtcctggcagactccagctacgtgccctggagaccacgtggaaactgacagtctgggaatggattcttttaccactttctgtgcctgtgcaccccttggaaattcctcatataccctcagcggtctgggtaagccatcaacttcatcagttgaagacagctacactagatgattcccaaagctcccttctaacatactaggatttgacatcttgagccaaagcctatgttgaggctccacctaaatcccaaatcctcttttcccaacccccacactgcctggctgtgcgacagtgccctcatgcgctaggaggttttccctctagcagcagaaaactcacacactacaccaccgtgtgtgtcactctctcctgagttgaattctactatctgacacaattcacatacacacgaactctttccagaatttaaaaactgaaatgacacttgaggttacggaattggaaattcacacacacacacacacacacacacacacacacacacacacacatggcataagcagccattcaggtattctgtacacaaaagtctccacatctgcctttcaactggtttttttttttctgaacggcatcaggctgggtggatgtaggccacacatgctgtgtaggctgacgttgctttcacaataatgattagaaggtctcaaattccaatgtcagatgacttgaggtgctagctctttaaaaagaatccctcgttctacagaaaacacacacacagacacataaacagacacacacacagatacacacacttattttattttatgaagcagattgtcaagagaaacctccggtgcacacgcttaccaagtgctgcttctgtactcttggttttctttaggcgggacagccctgctgagccctggatgctgtattgtaaaagggaaagtaggtcatggccacaggctgtcagtcctcagcataaatcagttgcagggagataaaacctgtcacccacaaggaagtaggcacgtgggcacccacatggccaccctgtcttcttctctaaggctgagacaacccatgttcctggggaatgcattttattacaaccaccagaatgcctggagcgattttttttctttgaagttagcagctttttaaaggaaaggtgaagttcgtaaaaagccatggatgttatataactacaccatccatcttttatgaggttcagggcaggctgaacacctccttgtaatttactaaaagtggggaccccagaggctcttactaggtttctcagcttctctgtgccttaggaaaagccgtggatatgtggccctggctgggcccctgcagagtccggcttggtggtaggctggcatggtggcttgtgggtgatgtgtggaagtgcagcggcagaccctgtggtgggaggtgagtggtttcagagtggccctcttctctgcccacaggcactcatctccttcatctccagggtatgaggagggatccagtcttggatgctaattgtcttgcagttcgttcaggctgcaataacaaaagcaccttagactgtgtggcttaaacaacaaacatttactgcccacagttctgaaggttgggaagtccaagatcaaggcaccagcaggttggaagagggactgcttcccatttcctaaatggcatcttcttgctgtatcctcacatggtgtaaatgggaaaaggaactctctggtgtctcttttataaaggtaataatcctagttgtgagggctccaccccacgacctaatcacctcccaaaatcttccacctcccaatgccatcacattaggggttaggatttcaacatatacatcttggggagggggacaacaaacattcagaccataacactatgcgtgcccctgagttcctctgtgagttcccctgtgggatctggctgaggccagacacaaaactgcggctgcatcctttctggtcttctcctgcttccttcgctccctctctcccacaggcatgtggctctggtcccattttacttcttctccattgcacttgcctatagccctctgttctggaaagcaaggttcactgctggaccctggggcatgagacataagacacacacagccagagatgcaggcagccacagtggctcatacatcttcagtcataggaataaccatatacaaaagcaaaaccaaactaggtcagtgtgcaccttctccctcccccttcccaggatcaggtagtccattttaacaggggcaacccacacacagggctccactcctggcctccctccctgtggggctgacgtgggagggagttctctggtgctggcagtgttctagaccaggccagaggagagctgagccaggatgagtcatgcatgggctgggaattggtgccttccagctctgagagtccctgctctaattccacctcaaatcatttttgtaatgagtcacagtataagtacaaattatttaaacataagtggttatgggaggagtgacatgcagactaggaaagcccgtgggtaaccatagctcagctccctcaggtaacagataccagccgggcttctcagtgagtgttcagaggagccctctgtgctgccctgtctacgtctttgcagaaggaacctgccctggacaggcccagccttggcctccatggaggcagccctgaactcttctttggtgccagattaagatgaattttgccccaggatggatcagacccagagtcacacccataactcattcattcagtgatgagatttggggctttttgagctgatgatatatcattattattattattttttttgagacagagtttcactcttgttgcccaggctggagtgcaatggtgcaatctcagctcactgcgacctcctcctcccgggttcaagcgattctcctgcctcagcctcccgagtagctggaactacaggcgtgcaccatcacacccagctaatctttttatttttagtagagacagggtttcaccacgttggccaggatggtcttgatctcttgaccacatgatctgcctgcctcggcctcccagagtgctgggattacagggagttgatgatatttagacaagattttagacttagaggtgatgggtgctagaatgggttaagacttctggggatgttagtatggggtgaatgtattttgcatgaaggaaggatgtgaaattttggtaggcaaaagggtcggctgtagtgagttcaatggtgtctcttcaaaattcatgtccacctggaaccttgaaatgtgaccctatttaaaattagggtctctctcttttatttatttattttttttggaatagcatcttcctctgtgttgcccaggctggagtgcagtggcacaaccacagctcacaaccttgaactcctgggctcaagttatccactagcctcagccttccaagtagcttagactacaggtgcacgctactacacccagctaatttttgtttttgtaggcatgaggtcttgctatgttgcccaggttgatcttgaacacctgggcccaagtgatccgcctgcctcagcctcccaaagtgctgggattacaggtgcatgccaccatgcctggcttgaaaatagggtctttagagatgtaattagttgaggattttgagacaaaatcatcctggatttagagtgggctctaaattcaatgatgggtatctttataagagaaaacagagggatatttggacacagagagaaatgggccacgtgtcaatggagggagaaattgcagttatactgccttgtacaactcaaggaactcctgcagccaccagaagctggaaatcttccttagagccctcagaggaagcatgagtctgccaacacctcgattttggactcctggcaccaaaatgtgagacaataaatttctgttgtttgaagccacatgttttgtggtaatttattatagcagccctaagacaggagatgaagggttcactggcatgccaaggacatgatgcagggacatgtgagtgtgtggtggtgtgtacctgtaatcccattttgatacagggacatgaagagttcatagtcatgctgaggacagtgctgctgagaagtccatcatccgggcaggccacagagcaccatcagagccagaagaagttattgttggcttccaaaaaagtcccaagtggatgttagtgaggcacagaatgagtgccatctagggctgggcctgaggctgcagaatggaggccacagcagggtttgtggtgggagaaggtattggtctctgcaattaggtagacctgacattcccacttagtagtttttttttttttttaatacggagttgtgctcttgttgcccaggctggagtgcaatggcatgatctcagctcaccgcaacttccgcctcctgggttcaagtgattctcctgcctcagcttcccaagtagctgggattacaggcatacaccacaacactcaggtgattttgtgttttt[131 bp omitted]tttgctttgagcttcagttttcatatctctacaataaatgcaatgtatctatgtggcagggttgaggcaggattaaacgaggtatgcaagtggcacagggtggatactgcactattagtctcagcccatcctttggtgttgctattgctaatgctaactgacatggctggggtaagtccacgccttctgggagtctcagtcttctatgtagccatcactcttgctccatctctcactaaccaccaacgagaacttttcctgtgcctcacactgtggtcaaggacttctcatacactatctcactaaatccttcccatggaactgggagctattgttaactcattttacaaacgacgaaacaggattcaaacccggtaggcctgtgtggttccgaagctagagccactcagcaatgtaataaaggcggctgttgttttcatggtcacaggttttgtttttatttttgttgaaagcaccatttctctacctgatttcattaccactcgggcctgaagtcacgtgctggtgaaggatcccacaggtgaaatcgcagaggctgtgctggagaaaccctgtgagagctgcacgacggcactgcaagatttttggactacgaggctgctccttggattcactcacccggagagacgaggaggctctgggactccagggaggctggcagtgtggcccagagcaatgttgaggctttggctgcagggagctgcttccttactggtctcctgcttcctctgttgctgccctctgggctattcttgacattagagccagcaaaggcaacacgctgctgcttggctcaaaacttgccagatgtctcccatttcatgcctagtaaagctgcatgcctacaacggcctgccatctctgtgagatttgacctcacctccttttccatctcctgccctgtcagctctggccagactctcttccctgttgttgctgaacacaccgggcccactcctgcctcagggcctttgcgtttgctgttccctctgcctggaatgttttccccaacacggctcccccaaccaatatccacaaggctcactaattccctttattaaagtctttgctcggccgggagcggtagctcatgcctgtaatcacttgagatcaggagtttgagactagcctggccaacatggtgaaaccccacctccactgaaaatacaaaaattagccaggcatggtggtgcgtgcctgtaatcttagctactcaggaggctgaggatggaaaatcatttgaacctgggaggcggaggttgcagcgagccaagattgcaccactgtactccagcctgaatgacagagagagactctgtctcaaaaaaacaaacaaacaaacaaacaaaaagtcttagtcccagcactttgggaggcc[132 bp omitted]gaggcaagataattgcttgaacccgggaggcggaggttgcagtcagccaagatcgcaccactgcactccagcctgggcaacagagtgagactccgtctcaaaaaaaaaaagtctttgctcaaatatgaaccctctcctaagagccctgattaaaattgtaatcccccggccccagaaatccctgctcccatttcctgcgtttgttttctacataacactgattccatctgatagtctgtatgtttcacttatatatttgtttacccttatactccttatggcttaagtgaaaactctgcaggacagagaatttgttttttgtctcttttgctttctgctatacactctgatgcctagaatactggcacacagtaagagttcaataactgtttgtcaaatgaatgaataaataaatgaggattcttaagatcatacagggtaattggcctgggtgctcagtgagtgttattagccttcccaccctgccccccacacaaaagtgattacaaatttagaagaaggtttgctgagatctggggagagccatagagacatttgcaaaccatcccaaattcaaatattgggtggtattcagtgtctacttacagtcagcactgtgcttgctccctccataagttttcttctttctagactccaggcctttgcacatgctgttcttaaatgttccttcctccaggaagcctgccctgacttcccaagactaggttaggcctcccttatccttacttccccccacgctgctgcagcacagcattgttctgtatctgccagttgacttgcctgtcaatcctactagactgtaggataaaagtgaaatctaaatctggcacatagtaggtacacagtaaaggtttgttggatgagtcttcaacccaggagccaaaaaccttcccaaatggacacagcctaagatagttgatctggatgctttgggcttatgagtgctggtcccatccctgccctgacctgagtctacagagtgagggatgctcccaagttgttttggtggagcacagatggctatcacaaaacactgcctcccctacttcattcccaagatggaggtcccaggccagagcagcttcacacatcagacctgtgtgaacctacaggtttttttttggatctcagctcattccagaggagttctttcaagcctgaaattgctaatgctcctccttccagaccctccagccagtggctgccttttgttgaggttggatagagaaaagcttctctaagaaagcggcctgccagagagatgggagatgcttggatgctaggcaactggtcagaaagcaaatattggcctcatctccagggaccctgccaggcactgtgcagctcagacgtggagttctttgtctggatgagagtttgccatttaattagattccccacctgatctgcctgtggggccataacaggcaacgagaggctgtcagcatccctaccccaggcagccaggagcgggaaggagctgtagcattggaaggtagggtgggtctcccatctcccaatcctgcggggtccgtgccctgctggttcttgctccactccctctgggtgtcttcctccataaatcaagatgctcttagggacctattccctgtcctctccatagccagcccttccaagcaaagcaaagcaaacaaacaaacaaaaaaacacctcaaaggcaggatcgtggcatgccaatatctggtgtttttagctcttcagagaattttaccgtttatggagtgcctattacatactacaaatgaggcattggcatgtacattatctcacttatcacccagacctaccctgtaacataaaaatcatagatcacctttcatagatcaggacactgaagcccaggcagcatgaaagcagcgttcatggtcacacagctagtcaggggcagaactgtattaaacccatgtctccttcattccagtttcttcagaatcaaaccacattgtttctcttaaatgccaccctgttttatgaatgggttaactgagtattgggtactttattaagacttacaggatattggttcttgaacagaggtagatccaggaaaacacaagcaaaccaataagtaagctgactctagagaaggagatgctacctctattcctttgctatttcattcacgtggtgggagttccattcatgcaatattcagcttttctcctcaacccccttccttctctgctctcaccacatggggagggctgttccagccctgtgctgcctatgattgcagggggagtccacagaattctggcattcactattaggttaggaagatcatttcctcatagatacaaaccatgcctcatagagaccttattagtcataaagataacattttggcctatatcccattttatcttttcttgtttttcaaatggttccaaacctgggcaggaaagaggactgtatttatgggacattcttgaagactgtaacaatcctgtggcctaattccactggattctacccaggacacatgctctatgagcccaccatgcacacagattgtgcctctgccagtggagatatctaaggaatgcatggcccctgtcctcctgggcttcacaaccaagctggggagacacagccaagccacaagatgcacctggcaattctaaggcagcgtactggaacaccttcatgatgccagcaggcaatcgtggagggatccacttaaatcaatattctagttgagatttgctatatataaatggaaaacccaatctcaaaacactggagtacagtaataagtattctc[220 bp omitted]gaggcaggagaatggcatgaacctgggaggcggagcttgcagtgagccgagatctcgccactgcacttcagcctggggacagagcgagactccgtcaaaaaaaaaaaaaaaaagatttattctctcttcaatgaatcagaaagtcttccatgatctttcagaaatttaggaaaatcacaactgcctgtgttttatagcccagcactatgaccagttctttcctagttaatcttcaatgcaaccctggatagaggatattattatccccatttcacagataaagaaaatgaggctccaaggacttaaacaacttctcaggatgacttaaataggatttaaacccagtctgtgtggttccacagccaagtacatcctagcactcctcgctgcctctcgataaacataagagccttaagcccttgacattcatgagagtaatcccgagacgtccgggagttttcaatttacaaattccactttagtgtataatcgcctccataaaacacctatttttcttgctgaggcccataccttctcagtcctccttacacttcacctatttctgtttccatcaatggtggttaaggttctttccagggcactttgcttattttgtgggggttgttgtgcagggaaggtgggcagggagtaagagatctggatcgagaggtgattgctggactgcctgcttggtttacctgcaagccacaccctcactcctgcacaccagcccagctcactggagcacctggcagaaatcagaagcacatgccatttctgttgccgtggccagatggacatgatccactgatgaaaacccacatgtgtgtgcacacatcttccacactcacacacccctgcatttgaggcagagataccatgcagggctcttcccaggaaaccagcagctgatgacagagtttcttagaggatgaagttgtacattgatggacacaatgttttcttaataactatgcatttcataatgattattagaataagtgtaactagtacatcaaacccagatttcacagataatatgactgatcttccatcaatagcaatgacatgcagttttctctgaaaatagattgaagtaaacaaaatgagtcagctcaaaggaaaatatttagtaaatcgtaggactgcagtacttggcaatggcaaaaaccctgaggtggtctgtgggtgaatgaagttgggggcaccatggctgccagggtatgatgggtaggagatggggaaatgtgggtagagaggaaacctgaggccggttcccaggggaacttggagcttcaaagaagggaaatcttgtgttctggctggtagacagaaggaaaaaaaatccaagcctgtttcgccatcagtaattgtgtgtggaatagactgtgtgtgatgttgagggaattcaacatacaggaacgatccctccgggaagatttaaacacatcttctttgaagacgtgaatataaaaacaggacccattcttgctatgatcaaatactcttctagggctttttttcacttaaaaatactttttagtatgaaaaatttcaaacaagtacaagtagagagaattgcatgaagaattccatatacccatttccagcttttccctgatcatttttaatcctctgaaagaaggacaatctaaccgggagttgggaaaagcaagtgctagtttggctttgccacaaattggctgtgtgaccttgggcaagtcacttgacctctctgggcctctgttttccctttttcaatcctgggatgaattcaatctcccagaaaccccttgtcccccagcccgcttctatatgctcatgagatagcaacaaatgcacatcgctaggctaactgtggtgctgagggaattaaactgataaggttttctattctttcattctttgcataacctttcctatggagacagcctaaggaagtgtagggacatgctaagtgatcctgttagattagatgaggtcaaatacttcaagatatgtccccatctgaaacactttgcattggcagtatttggagacaactgtgtatttgcctgctatttacattggaaaggcaggttaggtgatcatccattgactggagaaaaccatgtagacaaccggactggaaaatgaggcctctaggaagtgcgtgaaatcctgatttacatcatttggtgatctttttggtcgaattaatcagatcactgtttacgtgagccaacacataaaatgcttagcaaagtgcctagaataatatgcattagatataactttcatgatttctattttccatgcagatgtttgactaaaatgtttacgcagacacaaagctcacacacaatcagctttggtaacaaaggcaggataatctactttaccacgagaatctatgctcccactcagcagctgtcattccctaagagtggcttgtcctggccacaccttgccccaccacgagacccttggctcttagaggatccttgcatatagggtcttgtgctttcaacacacagccttcagcattgaggacaaggcgtggtctgaccactaaccctgcctttttcactcgttcagcatctctgctcaggcgagaatgcagaggaatgaaactccccacgcacctgttaaaacaaggtggcacatgttgggagtaagaggaacaggatagggagtgagtagctctgagttctgctcttgggtctgccactgtgtgatcttgggtaagaccctcctctcagcactcttggtctcatccacataacaaaagcgttaaactgggtcacgtgggggtgtttttagcattaacatagtctattctgtaataacgatcacataataattatactaatatagatcataacatcatcattataactgtatgacaaccatcacatgcattataaagactccctagtggccatggctcctgggactgctcatcatagttctagttactccttaaacacattttcacagggacatggctgctgtctttgagaaactcataatggaatggaagagatgaggaaaagatcaattaaagtgcagtaggagctattacggaaataggaacaggtgcttggggagtccagaggaggctgctaggatcctaaaggggctggaatttcagctcatctttgggttaaacatctgctctcccatcttgagtcaatatggaattttcattcattcaacagctgtttgctgagcatccactgagccccgggcactgtgctggctgtctatgagggctgagcacacaaagtccatggcctgttggaattactgactatgaagaggcagacaatgcacaaataaactaaaatgtgggttgcaaattctgtacagagctatgaaggaagctcaggaatgatgttcaggaatgacaggaactgatatgccttagagatctgggggtcctccttgaggcagtggctgctgagctggggtcctctatgtgaggagctggaagagcatcagagggtaacatgaaaaaaggggcaaagagcctggtgggctcctcaagaaactgggaggaggtcaagtgccaggagcactgagagtgagagatgaggccataggctaaggcagatgccagagtgtgcaggccccataaggggtttgggaggaagcactaatggaggaaggcagagagtgaactgatttaccaattttaaaagcactctgggccaggcacaatagttcatgtctgtaatcccagcactttgggaggccaagacaggagaattgcttgaggccaggagttcaactgtctgggcaacatagtgagaccctccctacctctacttaaaaaaaaaaaaaagtcactgtggattcctggtagaagatgaaacacaggaaaccctgtgaatttagaaatgctggtttggaggtgtaccatccaggcaagaagtcaagtagcagtcatgatggagctaggtctgtgggttcagaatagatattgatggtggagttggcctaattggctgggggataagatgtggtggtggggggaagggagagggagaaataaagagcgactcccaggttcctggctcaaggtatggggcagatggagttgctgtttgcagagagggcgcaggcagggagagaaacagaacacttctgggatgacaggcttccctaaggatgaaacgccatgtgtaaagagcgcctaacacactgtgctctccataaatgctgaccccttcatccccttcttgtatttaaaacgaacttcagtgcagtagggcaactttaataaagcccaggtaggcctggcagccagatcagtagaaagaatggggtcggggaacttctgggcaaataggcgctgtgccagagagccttgcaagggcgcggcggggttcacccctgctcaggaggaaataaggaatccctcctgagctaagtgcaagtgaattcagccagcaaggctgataaaaacaattgcctaaatgagcaagtgcatagtgccttactgtttacaaagcacttttgacatacgttatcccatttgattcctatagtcacatagaagcagagccataatcccaatttcagggagagggaagctcaggcttagagtgcattagggacttgctcaagctcacacagtgagtcggtggttgcccccagcctttctgattctcattgagggttccccagcacagccagtttgtccatcagccaccactgacaaaggccctaggacctaggaggtttttaagagccaacaacaagaagaaaattggatttgaaaaaagatgtagttagctccaaaatacaaaaagaaaagggcaggaatgaaatgaataaatgtttatctacatttccaccacatgtcaacttcttgccatagcaccttcattcattgttcgatagagcgtttattaaggtttcattacatttgaaaataatgtgtgagccacattctcctcactttgcaagaattccagagtacatggggtgggtgttcagaaatcatagccagtggtgagttaggtggtgagccaatttctagtcaaataaccgcaaaggcaggattttaaaatcctttcaaagtattttacaacaaaaaattatatatttcgtgaaataagttctttttagtgtgtttgatacaaagtgaggtgtggtttcaaatacaaatgttgagggcctgagagatcttaggtgtccatctggcagctcttcagctctccttcggatctcttttctaagtttatttggttttcatgaaactttgtgaatccaaaaagaaaaaaaaagaaaaccacctaaaatcgtctctagttttgaacctaccagtatttttggaggaagcgtttccagggaacagagacaatggacaaagagaacaaggtagctttcagaaaatcaaggtagagagagtctacccgtgtctactctcagccaggaggccagtagagaactgacccagcagaaggagcttcctggagcaggagtcagttggctaagccaagagtaggttcctcagtggttgtgtaaggacaggagggcgagtcttccctaagaacaaaggcgggtaagttttggttttatagctcatgcatgcactcatttttctgagcatctcctctgtgccaggtgctgctttaggtacttggaataaatcagtgggcacaagagacagaggtctttgtgtctcagggagcttagactctgaagtatatgtgtatgtacgggacagccagaaaacaatgaacataataaaacagaatatatttgatatatattcgaacacaatatagcatgttcgaaggtgatagaagactatgaaatagcagaggtagatgagtagaatggggatgccaggggaagagggggtgtggtttgcagctgaaactgggttggtcatgcttggtctcactgagaaggtgagattggacttgactctcaactttcaagactgcaaagtggtgaaggagagaaccttgtggctatctcacgaaagaacattccaggcagagggaccagcaaatgcaaaggccctgaggtaggtgtacgcctggcctgttcaaggaacagtgagaaggccagtgtaggtggagtggctgagtacgtgatagtgaaatagatcagggtagtaatgtgggcaagagcatttagccactgagatgcctgcagcttttcgttgaatgagagaggcagccactgggtgtttttgaacaaatgattaatgtgatcttatggatgtttaaaataatgcagtaagactagactgtaggggagtgcattagtttcctgtggctgctgtaacaaattactataaactggatggctgaaaacaacaggaatttattctctcaaagttctagaggccacagatccagaatttgtttcactgagctggaaccattgtgtcagcaggtccacacaccctctggaggctccaaaggagaatctgttccttgcctcttccagcctccggtggctccagcattcttggcttgaggccacatcactctcatcaatctctatctccgtggtcacattctcctcctctctgtatgtgtcagttccccctctgctgctgatagaaacattcatggtgatatttagggcctacctggataatcctacatggtttgtccatctcaagttccttgacttaatcattcctgcaaagagtctttttttccaagcaaggcaacatttacagcttcctggggttggtacttggtatttttggggtccatgacccagcctcctacaggagaaagggtagatgtagaaagtcctgctagggggcttctggagtcatccaggtaatgcatagtgatggtttagatgggatgggaacagtgcaggctgtgagacatggctggtttctcaacatatttgaaaggtaaggccaataggattttctgacagactggaggtggggtgagagagaaagagaagggtgaagactggccacaagatttttcacttgaacaactggaaggatgaaggtgtcctcaccgagatacagaagactgtgggtggaataggtttcgggagtaagaacaggagctcagttttagaaatgggggcgtggtgagatgtctaaacatccacatggagatgttgagtaggtagctggggagaagagcccagggtttgggaggaaaggctgggctggagattttaatagtggagcataggcatggagacagtacttacagccatgggactggaggagatgagcaagggagcgagggtagagaaagaagggaactgaggactgagtcctgaggtcctccgacactaggaggttggggagaagaggagtctccgcaggagtgagccctgagacaaaagaaggaccaggacagggtcctgtctaggaatccaagtgaataaacacgtcagtggtgggaggtataacatggccttcacgccaagaccgaaatctcagccagggctgcagccctgccttctaactatccttccctctgggcacatgtggcaggtgtctgctcactctggaggcctcttggagctcccaggccccaaagcataactttttgcagcggttgcataaaccttagttccaccaaaggcagggcgggtggggaaaccattcactctgtaggttggggaagctgctgaacacctctcaggattcatgtgccataggcttgggacttactggcctgttagctagggagttgggatcatggtgggaggagaaggtggtccctgaaaagtgagtggggccaatcccaaaggtatggggtctgacttcacaggccaggagatcaggaaacaaagagggcattgggaatcagggattcttggggccagacacttctagggagtaatcctgcttctgacagttctatctgtgtcgatcttaggcaaactgattctctctaagcctcagtttccttatttgtaaaatggggctataaatacttgcttcctaggaaagtaatactatactgtgtttaagctaccaggcacatcataggtgctcaagaattttggtcattttccttgtgttgatttgaaactatttgagttagtcctgacataacactcacccaaagggagatgtccctttttcgaggagctggggtgtgggtggccagcccgtggccctggaggccacagccgggagcctgctcctagtgtggggccatagcccagcccagcacttcgctaccatcttgtaaatgtgtgcccagcagggccagggaagatcatgccaccagctcccagaaaacattacctgtacactcaaaaaatgtcctctgagtagaacaagaagaggccttggctgcgagttctgcccccagtcctgccgcgcttatcccatgcgccatgttctcgggcaagtcactgctcccctataagctttattaattcaatttgtaagatgagtggtttgaaccacattggtcatttccatatttttgttttataggaaaacattcttattaaacagaaaagccttgcatagaaccccagtgttttaaacaaatgaaagatgccctggttacagtgcggaggggagtcctgggcactgaggcttccttatctcccccaagggagcccagggaccctctatggaaccctacaactctaaggaacaggcttagaaaaattctgactaaaggcaaaaattgtgcctctgagtttaaagctatatgtaatcggcattagatggcttgatgctgatgaatatgtatttcaaacagttatgtgcaaaaacatatttatgtgtatactttatttccattttaaacctgcagatagcaggccaaattcttaatgttttatgcctacttgttactttcctgatgtcaaattcgctgcatagttatattcaaagaaggaattgacttagtatttgtagtaaattaaaactgctttgactatcagagagagacagacagatcctgggctaaatatttctaagttctctcacagctcagaaaaatctcaaaattataactttttcttgcagttgatctctacagtttcatgaagtgggttctaggttaccacaaaattaagacacatgttgttgttcaatagggcaggaaagagtgaaaaccagctttagttgaacacctattacggatcagctaccatcttatcttatttatttatttttgagacagggtcttgtactgtcacataggctggagtgcagtggcacaatcatagctcactgcaacctcgaacccctaggctcaagttatcctcccacctcagcctcccaagtaactgagactacaggtgtatgccaccatgctcgtctaattttttatttttgtggaaacagggtcttgctatgtggactaggctgatcttgaactcctggcctcaagtcatcctaccgctgtgggctcctaaagtgcggggattacaagcatgagccaccacactggcctcaggtaccatcttacagtttattttagttaacttttagaccaatgtaatgaaggtgcaagtaccaatttttcccactttgcatatggggaaactgaggctcagagaggttaaagtggcctactcaatgtcatacagctaataagatgatagtttcaggattcaaactcagatctgtattcaaagactgtgctcttcccaccccaagttgtttctaaaggcaaaaaatccctttgatttcaggagacagtccttgaattgtactaagaatgatcccttgtattgattggtaagttcttggtttagctccagctttcccatctacattactcatgctgctctcccatgaaccctgtgaggtaagcaggccaggtactatcatgtccgtttttcagataggagaattgaggtttggagagatggagtgacttgcctaaggttgtgcagagcatgaagaactggggtcttgctattccctcctgaatcttctcccaatcaagagtgtgagccatataccataaggctatcttgctcagatagttcatgtcccaccctctttaggagaactcatttcattttcaaactgcaccgagttctttcatcattgcagctttttcatttattaggcgttcaatttcccttacattcatcatttatttgctgctgcttttcattttttaagaggtgaaggaaatgcaaattagcaaatgaatgtcatgcataatacagccggccctgctacaaacagcttttgttagagtccgctctgttctaggacaaattggtctacaaggacccgatacacctctctggatgtgttgacacagacgcagcctgccaggaaaggacaatggcaaaagcgtgcttttgtttggtctgccattcccggggttaatatgttgggtaatatcttcagcattgtttccccgagccataggaaggtgtgtgcccagccctgcgatgggtgcacagatgctccagtgctgttcacgtagtgcaacttggtgcagccccctcattcttggccttagttcttgaactacctgatctcgtgtgtcccttgcacttgactctatttcttggcaattcttgctggagttctgccactcacccttctcttacgcctttgcccagcatctttggcttattatgtgttctcttcccctcatccaagaacttggcttttcattgggctatggccacatctctccattttaacaacatactcgcagactgccttggcctcttagatttatggagtactgtcctatcctctatcctatgcctctatcaggtctgatttgttcttgtgggtagaacccagatccacctggattcccagggatgaaatgttttaatacatgagcttaacatttgtatgttaagctccaatcgaaataacatttgccattcattgcatgctggacaccgtgttaatgcctttgtttgctaggtatcatctcagtcagtactcacatccctataagatagttatcacagtagtcccactttgtagatgaagaaacagagaaggtatacaacttcccaagatcacacagctcgcaggagacagagctggagttcaaatgcaggtccacatagtgttttcagctatgtgcaacactgccttccagccagtatgaacagcttcaggagctcaagaccaaacagatatattactgactatggttttgagctagattttagtcatgagtgtacacaaacacaatcatgtgtgcatgcacgtatatgcacaccatgcctcatttgtctcgctgggagttataggagctagaccagagctgaaaatgaaaaattactgctaggtcagtattattaatgcttcatggaaaacattccacttccaaacaattaggtagacagattttcttgcatttcttttctttttcctacttattactacagatgtttacaagaagaaacaaaggtttctgcctctgcagcattgactagcatttgctggcagataggatcctctttggatggcccaggcagccagaggcagaaggaggatttgcaggtatgagtgaccaactaactcctgagactggttttcacgaaaagaagaggaaagtgaggatctgattttaaaaagaggatttttaaaataaaggccatatgcaaggctttgaagagccttggattttccaagtataaaatgtggaagtggcctgatcttggtggatgttccagccccatgatgccgagaccatcagactggggataattaggtgaggaagcaccctccaacccacccaggctctctacaattaaaccatctgttgagttctataattttgtgggttcccaggatcttgtttcctctgaatattttttgttttgtgaactacaggtcacaggggacagctgtagaagagaggaacctatttcttgatgcaagttctccaaaaccatttccatcaattgctaatggtttcattaacatgcactctggggcttggaggtgaagtccaccagctaagaacatcagaactgctaaggaggctcaggcaactattccagaggtggctctgggctgctgaggagagctgggtggatttttaggatgttaaactcaaaaggtcagggaacactggtccaggactttctatcaaacctataatcctctctctacctccagttgtgcctcccctgtccctgtcctcatactgtcaccaatgtgatcatcttaaaatgtatatctcggacatgatcataccatcttggcttcccttcttggatgaaatacttcagttgggacaaaagtgaagttctttaatctggctgaagcctttccaataactatatacctctgctaccccaaaccaataggctagcaccgtcaagcctcatgcaggctttggatgcacccagcttcctcttacccccaggtttttgcccatacagtttttgcccatagcctggtagacctatttcccctcttctccatctagttgacctctattcatccttcagaaggtatcacctccttcatgaagtcttccctgattgtctctcccactttgtaggcatgtaaaacctaacctaacttaaaatttttaaaattaccttcaaacttcatattttaaaaggatatttgatccacaggaataatgcttacattgtaatagtaagtcaagaaagcaggatggaagaaaacatgctaaatatcctcatttttgttaactaatccccacacagacacgtgcatgggtgcacagcaaacagagccaaagaaaatacaccagcatgctaatagtggttaccactggttggggagttctatggaatttttattttcttcttttatgtttacaaattatgtacattttatatgattatctaattaataattagacaaaatgctatttagaaagaaatctttttttttttttttttttttttttgggacagagcctcgctctgtttgttgcccaggctggagtgcagtggcacgatctcggctcactgaaacctccacctcttggattcaagcgattctcctgcctcagcctcccgagtagctgggactacaggtatgcaccaccacacttggctaatttttgtatttttagtactagcagggtttcaccatgttggccaggctggtctcaaacccctgacctcaaatgatccactcacctcggcctcccaaagtgctgggattataggtgtgagccaccatgcctggccagaaagaaagagttgtgctaaatattgtatgtgaatgtaaagaaactggaaaaaaagagagtggttagatctctatctgttgacacgcgataaggtaaaaagtgtaagctttagactaatgcatatagtttctgattaaaaacacacaaacaggtgactatatgcttacatatgtgtgcgtcaacaaggagtatgctgtggaaatgttcgcatcaggctggtaacactggttacatcaagaggaggggggatcggagggacgggggggtggaggagtcagataatttattttgcctttattgatctttgtagtgttttatttcacttcccattgtaagcatgtgccactatggtaaattctcagaaatcaaatagaaaacgaaaggctctaaatagcaggatggactaaggtgtttataattaataatataagatttcaggcatgtcaaaatgttatcctcaaacttgattttctggatgcttcactagagtaacttattaactcttttaatttggaaattatcttaaatttagggaaaagttgcaagaatgctacaaataatgggacaaagaacaccaatataccctctacctaagtcacctcttattaatattttcctccatttgctttattatttgttcttcagcacagtaatgtttaattcacactaggaaaaaaaacgcattacagattcatacatcactatttataccagactaattaccatggatttgagtggtcacttaaaaaaatacttgctatttcttaagctacagatatgctgcatgtgtacaaaaaatcatatagacaagatcgttctttgaaaactgaataccaccaaagggtctggccacagcgattagtaaaatacatgatagtgagcctatataagggcttgttacagagcaatgaaaaaaacaatatggatttgtgtgagatgataagaaataggtttgagatacattaagtaaaagatacagaacaaaatgtgtagaatatgagcccagtgtgcaaagaaaaaaaagatatgctagaaagagacacaagaaatgattggtttacttttaggaagagtgctggggtctttttattatacttcctattatattttttttacactctgcattttttaaaaccatgtgcatgtatgactttcatgataatagagaaatgaattggcataaaaaattttactgtagggccaggcacggtggctcacacctgtgatcccagcactcacacctgtttttccagcactgaggtggtgtatcacctgaggtcaggagttcaagaccagcctggccaacatggcaaaaccccatctctactaaaaatacagaaattagccaggcgtggtggcacgtgcctgtaatcccagctactagggaggctgaggcaggaggatcacttgaacctgggaggcagaggttgcagtgagccaagattgtgccactgcactccagcctgggcaacagagtgagactccatctcaaaaaaaaaattactgtaagagaaaagctgtttaccagttcctgttggttttggaatatgggaggaggccatttcccctccccactgggttcgctgggaggtgatagtcagacttaagcctcctgaggagtcatctccctagcagcagctctccctattccctacagcaggtgcaggtgcagagatggtggactgccaggcccctgggtctaatgtatcccacaaatgtgctacctcccatcccagagtgctctgaaatttgtgtcaacattgaaaaaaatggagtgattttacataacaaattcagattcccagcctatctgcagaaatctggcaaaaccagggctgcgtttgtaagcacaaccgtgggcagcagccaggtatgggctgcctttagcaagtgaggaggcctcactgaccaggtgccctcctttacaaagcccattagaaattgactcccctgctccgatgtctcatgggtgaggccctgccccgctgatggaagggagatttgaacatctctccattgctgtctctcaatcaagcaatattttctactggaggctgtccaagcatattctaagaaattccacagtgagaggagggttgttatttcacacttttagtatataggcgaagtggctgtggctcagaaaagtgaggtaacttatctaaggtcacacagcatgttagtttcaggggcaggacaagagcccagagtggcaaactcccacccctgtgcacgttcttctgccttatgtggccttccacaggctagctcccagattggatgatggctgagagttgagggctgggctctccatgcacacaacctagcccttccttctcaggtaccatctcctgagcaaggcaggtgtgtggtatcaaggtcctgtgacattcagagaacacaggtacaacagcaatgacaaccacatcttccttcacagcactcatgtcccaagaggcaggataggctagaggctgagagtgtagcttagaactgtggctttagtacttcctagctgggtaaccttaggtaagttatttgtctctctgttcttatgtttccttgcttgctaggtggagattacattataatattagcttctacctgataggattgttttcagcattaactacattagtgtgtgcaaggtgcttaaatcatgcctggcacgttgtaagtgcttgataaacaagttatatgattttttatgtgacaggaaccatgctgagtattttgcatgctttatcttagtcttcccaactgtaatcaggtaggtgtcattcacgtgcattcattaattcatgggattcacagcattcattacgtgaattcattaatctactcgttcacagcatcattaattcaacggatctttaggagtatctagttacactgggtgctgcccttgacgttggggatatggggtcaagaatgcagaaagcttacatttctgcctttatgaagcttacattctactgagggctgggtggacacagacattaatccatcagttaatcaagagtcaggagtgatccatgctgtggagcaaaataacacagggtaagggacagagaaggaggatgggtagggagttgagtgagtaatttggtgccatgaggtaagggaaggctgctcccaggaagtgcactggagcagagatctaaatgaagtgagggagcgaggaggcagatgaacacaggaggagtattcctggcagaaggaaggaaaagtacagcggccctgaggtggtagtagaggtgagtttgttgcctagaatgtttgtggaacacagaggaggtcttagtggctgcaaccatgagcaagagggagtagagcccagacgtgggtcagggaggaagccagaagtcaagacatatacaatgttctctgatttgtagaagaagaaactaaagctcagtgaagttaaataacttcccagaagtggcccagctggtaagtggtagaacaagggatttgaacccaagaccatctggcttcaaggcatatgctcctaaccactaggatacattgctatgaacatgcacagtggaggccgggacatgcacatatagctatcccaggtggtcctgctccaaactgtctgctgggaaattagacaaagagtaaggagtaaggcatagtgagagagcgagggtgtgtgtggggtgaggagtggggaagagcagaaaggaaggggttccttttgtcctggcatactcatatttgccttagcaggttgaggcagccattccgggtaatggtgagggctcagggttgatatgaaaagtggcatttgtctaaaacttgtcagttcttggggcatctcggaacggacagttttgaaacaccaaaggcactttaaaaaataaaaatagcacatttctaaatgcaacatcctctttggtaatgatataatgatatattaggcctccatcgctggtggcattatcttgtacagcaatatattgcactgttacaattcacgccatcagtctgcaaaaccagggtcataaaaccctgtaatttataacagaatcttgtaaacctatgtattatacatgtgtagatatcattgcctggcattccacatgcagtaactacttggttcagaagtcagggccaaagcacctcccaccgcccattcctcaaatgtagggctcaccagacaaggtgtgcatatcattgccaggccccctttactgagcagtaaattaagcaacaggctgtgtcttggtggtagaggaaaacaaagataccaaaacagcaagatgtgatgcaaagaggagagagtgacagcctgaagacttggtcatttattttatgatgctccttgttcgtatgatcacacgatccctagtaggtgtcatgcacccagctgggaatagggatggaagtaagacgcaatcctccttctggtctcatgtttcttaaaccttagtgtgtattcacatcacctgggaatactgttggctcacagatgctgggctctaacccgagaatgctctggtttgtgggtctggagcctgagactttgcatgtctaatgagttcccaggggatgctgatgctgctggtcctggggccccgctttgagtcattctgctccaagtgactttgggacgctctatattaaagatgctgagggatattggctgagtgcggtggtgcacgctggcagtcccagctacttgggaagctgaggtaggaggattgcttgagcccagggagttcaaagctgcagtgagctatgatcataccaccgcactccagcctgggcagcaaagtgagaccctgcctctaaaaaagaaaaatgcagagggagaaatgagctgccccagtgaacacaggcaggggcagatctgtggataaagcctggcctcctggcccctgaatccaggactcttccactgggccacactgcccatttcctggctttgtctccaaatgctctccaaccacaaaagtagcaacagggagaggggtgccagaaagatggcaaccagacgcatgcagctcacagcagaatctgcgggcacattaactctgcaggggccagttggagcactcagcagaggccactctgagcttcctagggctcccccaaaggtcagacagaatcatctaatagcttcttgaagggaaaatgatggtctggtggtttttttccctgctgaacctcatcacctccaacggccacactatggatcgctgccgccaggggggcggggaatacgaggtctttgctgtattgcaaggcagaacgctttttctcgagaggtcttaatgacttatgggatgaaaggtggcaagtggggatgccatgcccggctgaaccctgcaggccagagatgccgtgatagtcacctctctccaacccagtgctggggccccatgcctgcttccttgggacagcccccgtcccttcccaggggtgaccttctcaccaccaccccttgctgactggctcctcacaccgtgcaggtgcagccccagtgcgtctgcatgtaaatgagcttgggccgaccaaacgctggcctcctgctgccacgtagcatgattgcagacattttattgccaggtgattgctcttcgataggaaccacctcttcagaacccttttaagcctctccaacaaacattctgatttcattccttattgccctaatccagctgcagacccttgcgctcctgatttgactgcagacttagaaataaatatcccagtgtgcctgtcctaaccaaaggactattgatagcaagtagcaaatccatttgccacccaaatagtatcctggtttgccatcagtaatttcagaaatgtgattcccagcattatgccctctccaaactagctttttgcctcttatttcctagcttagttatcagaatttccacctacgctcttgagcaagatgggacactcacaataaacactgtctcccatcttcccctcatcacccactcacaacatcattaattctaatcctcctgttgtttgtggattagaaaacagctgttttctgagctgctatgtgtccctggtgctaggtgctgggtccttgtcctcatggagcttccagggaaataggggaaactgcaaggaagcacggaactatgctttgtcatgggcctctggtgacctggagaaagtcaattaacttttgatgagtgacatgtctggtttctatccccaaggagttcatgtgagaaggggagacagtcacacaaccagttctttgcagtaatcataacagctgagaggcacacaacactgatggtgtctaagagctgtatatatgccagcttatttaggactcataactgtccttggaggcaaatactatgattatatgagccacacaacagaggaggaaactgaggcacagataagtgacttgcaagcagtcagctgggatttgaactcagaaagtctgctccagaatccatgctttcaaccctggaatcctagtcacgacgaggtgaacgtggggggtgctggctgccttcactccagaggcgtctcctatcccagaggaggccagctggcctgcctggtccctcttggcctccatctgggtgccgtggcctcttgctgtcactgaagtgtgtgactaccagggccagaagatgcttctgtagggcttggggcccgctccagggcagcatctggagacaggagtaatgaagggtagctggcgcacgaccgggttgtcaggctggggactgaagggtgcttcctttgaacagtctgtgctcggcgccatgtaggctccactgagccatgaaaatgtctggccctcccagtgctgcttcaaaagactgcccggatgaccacctgtccctggaaacaggcttaccaaaactcacctgcttgcttcaaaattcaccacccctccatacccccaaggatctctttccctttctttctctaattttcctatgcacaggagggagagaaaatagggaagggaatggggagagggagaaagggagggagggggagaaaaggaggaagagggagggagggagagagggagggaagaagaaaggaagaaaggagggaggaagagaaggagggaaggagaggaggaagggagggaggaagggaaggagggaggcaaggtatggaagggagggaaaaggaagggaaggatgaatatatagtctgtaattgctcaaatgcctatagtatgtttctctcagactgttattccaagcccactgtattctgggccccaagcactttccaaacttacctatcaaaatatcccaaagggtcattcacacataatctatgtgtccaataagggacagatactctgctagactgtggttaaaccttgttgagtgtgacagatggttcttatcctcttagggctgatcatcattaaactaataaataacgcaaataaacatgtaatcacacattgtgctgagtgctataagggaaaagaataaagtactatgagagggaaaaggagggtcagaatggggtgaacattcccaagccacaagagaaagcctcgcccatgtgtagatgaggaatgttgaagtgagggcttaaggctgccgtggaatgaggggtagacatgccacgtctcagccaggcaggtggtgcccagggctaatgcaaaaagatgcgagaagacttgaaagaaattcatggatgtttgctccgtaaatgagctctttagaggaatgtaatgaatgctgcttcattcattaactggactgtgagctccctgagggaagggcatctgtttgttatccatctgggcattttccggccctagctgagagcttagtattaatttatttatatgtacaccgcctggttgcataaagacaagccggggacctctacagtggcagatgctggaggaactgtgtttatgctacatgattcacccgctgtctctctaagctgtgaggacaatgcatctcagaaaggaccactatctgctcactctcaccatgggctgtggctcctggctgtgagtccacgggcctattgcaggctgcaattgtgggttttttatgttttgattagtaaaccaagcttttctccctagaaaatgttgggcataaattctcaatgtgaaattgacaaaagcagagatgctagctggtgctgagcaggggaggaggcgctggagccccatccatatatagcagctgctcctcccactaggtgcttctgacaaaccctgactttgaccttctctggagatggggcctcccctctgcggccccatgaagactgctgtgcttgctcctgctctgcctgggctctggccttcagtgaaggccatttcagaatgaagagttggtgttctgcagcaggaggaagtgtgccttcattacccagcctaggcgtgtctgggctgcacagatctgggcatatgaaaggggggcccacccgctgcagagcttggtctttccccattctgcttacaagaagaattcctaaagcatggtgcccggttcctctccatgctccccttctgcgcgggacagagggtggagcctcgtgagtctcacatgataccggctaagtatcaataggtccccaagtcgcagggctgggagcctgggaatagatgagtggtggtaagtggaggggagggcaagagctttgggctggcatctcagtctgcctcctgccagctgtgtgaccttggacaagtgactgaatcaacctgggccggcctttctgcatctataaagcccacctcacaacgttatcgtgatggttgagtgacacaatgtgagtgcaatcaatctgcagaggcacaaggtatatgccaggcagcatgacatctgccaaacactttacaagccgtgatgtcactaccacacacagatgtagagaagcgcccaggatggtgcctagcacattgtgggcacttccatggcagctcttacagggcctagagatgaatgctatggccccactcagagccatgaatcaagcactcactatgtgcatggcatgactgcaagtgctttgcatggattgcctcagtgaatccttacaataatcttgtggagcaagtatgactattctcattttacagatgagaaaaccaagacacagagaggtgaagcaaattgcccagagtcacacagctagtaaacagtggcacagggaatgaaatgcaagctgcctaactcctttcctgtgatcagaaccactgcatcccataccaggccacgtgcatctctcacaatgtaaagtaagggcggcagctgaatttctctcatctcactcctgatgaagaactgtttcccagaacaatgtcagatcaagagccaagcgatcagtgctttggtccccctgtttccacctgaaagctctgtgggttgggctaactcagttcccttctctgggcttgggtttccccaactctaagactgttggcaggggtgagggtgctgatagcatgaaatctggttcatcctggctttagggtgtgagtctagggttcaaacagttacagggaaggacaatagttgggaaaaagtatgaactgaatcagaaccacatgtgttgggggaaaacaaatatttctggcccagctggatgtaaactctgccagagcctagcatcagcctagctaagaacagttaaggggctttgcccctgattatgtggctgtggccaccttcactggaggagaataaagaaggagctaaaggtgaagaaccatatgctgtgtggccttcactgagtttcttggcctctctgggtcacatgactccagttccaatacactccctgtaattcccagatgggccattttcttacagggctcctttgcctaggctgttttcactgcctggaatgttctcttctgcatcaccttatctgcctcaagatttagtgtggggcaatagcaaaggcatggaatcaacccaaatgaccatcagtgatagactggataaagaaaatgtggtacatatacaccatggaatactatgtagccataaaaaggaaagagatcatgtcctttacatggacatggatggagctggaagccataatcctcagcaaactaacataggaacaggaaaccaaacaccgccatgtcctcacttacaagtgggagctgaacaatgagaacacatggacacaaagaggggaacaacacacactggggcctgttgggggagtggtgggagggagagcatcaggataaatagctaatgcatgtggggcttaatacctaggtgacgggttgataggtgcagcaaaccaccgtggcacatatttacctatgtaagaaacctgcacgtcctgcacatgaaccctggaatgtaaaataaaataaaattaaatgaaagaaaaagattcagtgtgggggccagctctcctagaaagccttcttggattgggtgtcttcgctctggctctcccagtcctgggcttccttctacccagggtatttttcactagatggccattgtctattcattgttttgtcttcctcatgtggcagggaagatctctatgttcaaagtatattgaccctcttctcaacctcatcttgagtttctcataacatggaaactgaaatccaaactcctgaccctggcctgtgaagcccacctgagctggccccactcctcagttcacctcctgtcccatggccatggtggtcttgctgctccttgaacacgtccagttccttcccacccagagccttttcactaactgtcctcactgccagagtgttctcccgggaaacttttcctgtttgacaccttgccattcagaccccacaatgctattctccagagacacctaccttgaccacaaaacttaacacagtcactcaatcacccttctgctacaacccctgtttgagttctgtatacaacacacatgtgtttttatcctccccccatccagaacataaaccccagggggcagcaactgctgtgacgatcttcttccctgccatatccacagcaccaagagcaatgcctgactcagggaaggcattcaataaatatctgcctgatgaaagaatgaaaatgaagttccattttggcacaaactatttgtgatgaatgaaaaacaacagattcccagtttttcatttgggtcaaaaagaatgtctgcccctgcatttagtttaaaaaagcaaaagagagtagaaaatcttttttcttcttcttcaggagctaccttcccatccccaccccccacccccagttgcagcacatgtggcagaccctgctgtccagtagtctgagctgtgacctagctttgaactagtcccccatccgcacaaccgtggctgcccccttacacgtgcatccccgacgtttggaaccagacactaagtggatgatcgctatgattaagctgccttttaattattcaatgagatgtcaatggtgcatgccattgtgacattataatggactacaactccctcgcagatgtcaagaaaggcagggggccattaccttgtcaaaatgttggctccctgtgactttatttccagtacaccaactaatttttcatgtagcacagaacagcagagtgaggtggggtgcttgacaagggaaactgcttggagcgattcgggtgacacaacgatttggttgattctgtattaactcaacaaattctccactttttgaaattcactgactctcaaaattaatgaaattttaggggtaatcagttgacatttcttggctgttcactgggcagaggactttaacatgggtagaagtttggttaaggatggggcaggaacaagaaaaagaacatactggtgacatcctggcaggcctttgtttcattaaacaaccactgactgcactcacacacatgcccacataaacacacatgcatgcacacactcacatgcaccccttaccccccccaggaagcaaggagtgttggtttccattgggaatagtaagagatggctttctaaagttgtctttaactagttgtgcaactttgaataagtcagccctttgggttccagttgattcacctcttaaagaatgctaggcttgaatcatttctaaggtatgatgatacagctgatgactgaatctgatataatctgactgtattagactgatgacggtaatgattcatgccacacactctcgaggatcattaattgccttgcattcatcagtcactgactctgaacccaacactgtgctaggacagaagctaagtttgacaagttttctgccttcgggaaacttacagcagagcccaaaccccaaaggtgaagcagtaaacaggctgcagttaagaataattctggcattgtgctgatggcaagggcaactggagttcagggaaaggagagatgagcgtgggcttggaaagctgcacaggcatcttgcaggaggtaggaagtgatggtgctccggggagggacaggatacccagaagtggaggggacgggagagtgtggggtgagtagcacatgagggaggtggcaaggggcaaatgaagacacaatccctggtgtttccttgagggaactgaagattacccattccctctgatgtgggtggtggttgggttctgagcacctagcagctattctctcttcttttggtcacaagatcttaatttcttttgggaaattatcggttcctcaccgtgcatgcgtaaagggcttatgaatcaagggacatgtgacccaagatatatcgacaaaggactttgacttttgaaggcagttggtcctgtgcatgataaatgcctggtgttcattcattccagggacagcgccctgacctgacagaggagtgattattgcccctgtatatcatttcctgcttttttcagtctcattttccagcctttctattgattctatgagcaatctgatgtctttccaatataatcccttttgcttattttagccaagatcagcttctattgtttacaaccagcaaaccctaactgatatccacccatcatttatccacccatcatccatccatctttccatcatccatccatccatccatccatccatccatccatccatccatccatccatctatacatttatccattcatctattcactcatccatccattccccagtctactagagtattgaggagcagtaggaaataagtaaggacaatcaaaatacacaaagttaaatggaacttcaaaagccaggatttggagttaaaaaattaactctataacaataagaaatttagtgctaagtaacacaacacaggtgttccagtagataaagaagtcatcaaggtcaactgggacttgagtgggcactttggaggggatttttttaagagcaaagtttgaaggacactaacacatatagagcacctaccaccgtcccaagcacttttaccagagacatctgcctcatttccccaccatcctacaaagtagatgtccatgattccattttgtggatggggaaactgaagctcagaaagtttatgccgcttcacctagttcacatctactaaatgacaggacagagattcagaatcaggtcttaccacccccaacacacttgctctttcctccagcccacacttcctaacgcaaatacattgtgtgaccttgggcaagtcaacacccctccttgggacttcatttccatctttacagaaggagggggttggatgagacaggtgcattctagcactacatttaatgagcatatgaacaggtgtgacgttgatatgtctttcttctgtgcctgcaggaagtgcattgtgaggagtgccctaaaagaactatcctgggtacttgctttcctggggccccatattaccccagattcagaccagtttttgtgtttaatttttgacttgagattcttatgccacatgggtagagtaataaatccagatcctacactcacacatgatggaggcttgcagactttagttattgtgggagatttgtctccctgaccccccgacctagaacccctgggagacacctagcttccttgggcttctggatggagttttctactcttaacagaaatgatgtatcaagtggtgtcccatcggggggaaacacagaaatgacacccccatcaatagtcctttatgcaaggaccctctcttggggcttcaggtgatcatcaccctcctccatcccccaaacacaccagcctcctggcctggagcctaggacctggtcccacaggcccccaggaagccagctgtgtattgaacaccatggtttttaaggtctttcattgtttctggaacctaagggctccttcccttccttccttccttccttccttccttccttccttccttccttccttccttccttccttccctccctccctcctgcctgcctgcctgcctgcctgcctttcctcccttcctccctccctccttccttccttccttctttccttccttccttccttccttctttcctttttctagtttgtgcatttaaaaacactaggaatggtagtaaaactagtttctgtgtttggtcagcttagatcacctcattgcttaaagttcaatcacttctttagggagagcagaggaatagttccgtatctgagcccactgcctccagccatgtgcttggtcccagcaggctctgtgggccagcccagatgcctctctgctccatccatgcaagacttctcttcagttgaatgagggaagcctcctgggccccttcacttagcattcactctaactagacactaatctcatttataacttttactgtctacaatgagcgatttttttgaatcaataaactaattcattgcaaagtcaattggttaaaaattaatagcttacctttttctccgaccacccacctagtaaacccccaggttggcaagttatttccattaaaaggaaaaaagcctttaatcatataatcatctttacattttgaaatgataagcctccatactgattatagagctaattatgttataatcagcccatttcctcatcccagtcccctctcacctgagcacagagttccctggcttctctccttgccttggactagacctgcacccccttctatcctctccctgccttgctgccagagtggtctttctgaaatgcaaatttgatactgtcaatccatacaccctgtttaaaattcttctctggtctaccatcatctaaatggagtcccaaatgcatgtgagctgttctgggcctgagaatgggtttcatctagcctgcatggagctttaaacattttaacctaggatgcctctaggctgggtgtgtgtggtccagccggccagtggtgttactgctcctatccacttctacctgtctgtttcttatatcacctgtctgaaccttaaagacaacttcatttctaaccctgacaaaggctggattgcccaaatgaaatcttcccttcctaacctgagcccttctgtagtgtgtcttactgacgatgactctactcacttgaacagtttcaggaagaatacaaacagcttctgtttattgagcacctactctatgccaggcccagtgctaagcactttaaagacaacatcttggataaactgcacaataatgctacgcagaggaggaagctaaggatccaggatgttagagcttggtcaaagtcagaaagccaagaaatggcaccaccaggacctgggtttaagtgcatttggttccaaaacctatgcttccaacctctacactgcacagcctcctgcttctaaacaggggagaagcctgtcctttgttggcagcttgctgttgcacagagctgaccacgccccatttgtacccttctcccttgggtcagtgccctctagatttccctcctacctccttgactgttccctctcaccctcctttgcctgctcctttacttccagacccctaaatgttggcgaatccagggcccagtgctcagcctgctgctcttctctgtcaacacactccacttatgcgatcccacccagtcccactgactaaatgccactattccaccatgacttccaaatcccaatctcctgtcctgacctcctctggagctccaggcttatgtgtccaactacttactaggatacccaatagttacttcagtctcaacagaccccaaacattgaattcgcctcccacctctctcaacacccatatctaatctcccccagccttccattctcaattcatgttaccaggatcagcccaacagctcaggcccacaacctgggagttattcttgagccctgcttttatcaccctctactaccaatccaccatgaagtctcactggacctaccttcaatatatgccaaattggaccatgcttaccacctccatcaccaaaaccctagtccagtccaccagcatctcccatctcaagtattgcatctgcttcctaacttgtcatccagcctccattcttatccacactcatccagtctctgaagtcagaatgatattcttgcagggtatattaactcatggcactctcattcctaagccctccagtggcttctcactgcagtgggagtcatctccaagttcagcccagcctacaagccttggcatttggcctgcacctactatccaacttcagctcataccactgtcttcctcttctactctgctcaagacatacaggccttcattctgttttttgaacaaaccaagttcattctcatctcagagacttggcactgtatctcttctgcccagagcaccttgcctctaggtcttcccttgattgcatccccctatcattttgatcttggctcaaatgccacctgttcatgcagggcttcctgactacatgagctaatgagctaaagcatcttacaaacatccatttccatttctgtctatcctatcatcctattttgttgtcttcagagcactcattatcatctgaaattatggcatttgtttatatgtttaccatctacctttaccatcccattccatcccattgtcttctaaactataagcctcatgaaggcaaggactgtgtctgtgttgtttgtttgctgtagtccaatgctaacaggagctagcacacagtaggcactcaattaactcttactgaataaatgacctaaacctctgagaggtaaactgaattctgaagtagattttaggtgaacagttctttactgagcacctattttttgtacatagagatatacaaggctctgaggaaaatcctcttatcacataaacccatgagccctgccctgcacatggctgtattgtcatcatcatcatcatcaccattcctccatcatcgtcatcgtgagcatcatcaccatcaccaacattgtcatcactatcaccaacattgtcatcactatcatcatccaccatcatcaccatcatcatcattgtcagtagtagcaataatctccaacatgcttatgatgctttacattgaacaaaacaattttttatagattatctctttggtttctcagaacatcccagtgagggaggtttgtcactatttttcaacaactttttacaaatgagaaaactgagccctgggaggagagacacttgcctgagatcattcagctccacgatacccttgcaaagtatctttttcttttgactgaactgcctctctccacgccagcctccttttccacctggagacaggtgatgcaaacagagtccaggactcactcctgtttcaccaacacttagttaagaaattgccccgagtttgtacattttcattctggcaatgtaggagaagagatagcttttaaattgtaatccatggccaaattttatgactgctaagggggaaaaaataaaagcttaaggtgagtttaggaggactttttttggttggttaaagaaaaaaattacaaaattaaaagagtagaaaaaaatagattactagtgactgtttttactgcgtgagcttacaagctggagtggagaattaaaaagttatatagctggggtttctaaccatgacttatcgaagatgaatccttcatatttatagctttttctgtttttcccatctcaagatagtaagcaatcccctgatatagggttgttactctctgcccaggaaccctgggggctgtgtgtactcagcagagctgtcacagctgacaacacaggaaggacctgggagaggggcttgtttattgtccctctgcctggagggatccctctcttgttcactcaacaaccactgaagggggtggaggtggggagtactccttcatgccaggacccagtgaggagaaggaaggccttaaagaaaacagaacaataacagccaaagttccacaccagaagccatcctctcaattcatttcgccctcacaactgcaaataccaccattatccacattttacagatggggaaattgaggcacagaaggattaaacaacttgcccaaggtcacgctcagtgaactgcctctcaagatgccagtccttgaaaagtttaaaaagttggggggccggagaggggcaggaagaagaaagactaaaggcagaatgggagaaatgactgggggagggggaggaaggaaatattagttgagcctctgctttgtgccaggctccacaagttctgcctggtcatcatttttattccttgcaatcactctgtgggaaggcaatgggtggtacttacgtccattttacagataagaaactgaggtgcagaaatgttaatgaactagtcaaagtgagtttggaagtgacattgataggatctgaactgacatctgtctgtttccatttcatactgtctggatggccttgggcaagtgatgtgaccacattgagcatctgttttctcatctatgaaaatggaatagtattctctactctcaggcttatctcaggctctggatgggaaaatgctttgtaaaccaggcagcattgtgaaaccaagtctgctccaacacctacttgcaggtaggcaagggccagctgctttctcattagctggggatgaggaaattgaggcccagggagccaacactgacttgcccatatcacagagctaatacaaaaaaggccagaagtgaagtctcctgtctcctagcgtatagttctccaacattcactggtaagaggaaacttaactggggagagacagtacaaataatccagcaagtacaaataattgatagcaaaaatctaaacatggaaacacatgaccctggacctcaaggtcactgacttgttactttttttgacaacacaggctcctagaatgtccatcctaagaaagactgcatatatcagtgactccagctaaaaaatacccatgcttggtttgaccccaagccagtgaaatcagaatctctgggggttgagcttgggctttagcattaaaaaacaaaatttccccagatgatttctaatgtgcagctagagttgaaaaatcctgacttatgatctcccttattttctggatgggcactagaggcccagagcgggcagctaaagaaacagggttgtccaggaattagtggtagagtgcaactctggtctcctggttcctagcttgggactcttcctccactctcatcactcatcactcggcagttgtggtcaaagtgaccagatgatcctggtgccccctagtacctgaggacagacaccacccctcctcatttctcccactccccatgcctcctcaccagaacctcatgcccctagagagagctcagggtacctgggaggcccaggctgaaaaatgttctgcaagtctgcacctgggctggtctacacactgcaaaatgaagtggtgaactgaggcaattatccaacgtattagcaagcctgtccctgcggcactcctgcgagccaaagtaataaatacaaaatggtaatttctctctggaagcctgatccccgcctcccacacaattcccctcccacccagaagtcatataccacctcctggttgtcctctcctggatggggtggcagtaactgagttatttaaatatctcaggcaaaacctgctttttcgaaaatctgaatcttcgcactataacctcagttctcctctgcagcttacttgtctggccatagcagatccttctagacttcagtggaaagtaataaaaacgcctacaggtatcaattaatgactcccagtggctaacgtcttctttgtgtgtgtcgtaaactagcatcggccctggaaagggagtgggaagagctaggttgtagcttagacccggactcttgctaggtttgtgaccttgagcaagtcactccacttgcctgggatttggaactcttttgttacctttccctagagttgtgcaaatccaaatggagaatggacgtgaaactgcttgcagacttccataaaatctgtctatggaaaagtgaagacttaaactcaggtgcccttacccttacccactccacagtaatctctcagggcatcagtggttgtatgcagcacagggaagaccacggggttgcaggacattccagactgagggaagagcatatggaaaggctgggaagaacatgatagatacagtgaatcccagcagctcgacatggaggaatgcatgtgtgggggtgacagttgagattacctgggtgcttggccttatcttgtaggcagcacggaaccacatgataattttaggcagggaaggttttcaggcaaaagataaatggctggtccagtttttcagcaccagactggagaggccattgaggggtctagtttgttgactggatataggatactatgggagcaggggagattgacttgatgacttggagtatattcactttgattccttagaggctggcacagtgcctggtatatagaaggtactcaataaatgtatgcattagtaaatgaagctgtcaatcactaaataataataaataaatattgtcaatcaataaataaaagagtaagcaaaggaatgaatggctgaaaaaacaaatgagggtatgaatgacttaattgaatgaataagctaaggcatggtttgcaaacagccttagcaattctaactaaaggccttgtagcgacaaaagtgaaagcttctagctgcattacctagaaatgccctgttattggcacggctcccttaattgaagactttctcgctcctaagtagcaatatgctgctcaaagacaaaaactgattactgtgatcaagccagaggctctccttggattctcacctgtcattgtcacatttactgatatccacaaaatcagaaaagggagcagaaatatctagcagctcatcctcgcaggaactaactccttttggaggtatgtgactccgttgccatttctccgttcacatggactccctcaatggcttgtcatttcagtatcatataaagacaaaggaaagagttaacttaatagaaacttaacaattgctgtgctgtctgcacatctaagcagcagcagcctgacggtctagcctgggggaagccgctttgcttctcagagcaggattcaggacaaggtgggctttgaactctgtccaaaggatgatttattgtaacagaataaaatggcagggttgatatgcactcaggtctgtctggggacagaggcccttctttctcttttattccatcctgcttttgcctccagacttgtacatccttgctacatataatgtggtcccatgtacccgtggtattgatgtcatttaggagcttgacaggaatgcagaatctcaggctccacctactaagccagaatccgcatttttgcaatattcccaggtgactctcatgcacataaaagttattgaagtttgagaaattctgtctatagatgacccaggtggcactgtgggccctccaagccaaggattcaattccctgtgaccaggtttcacagtgctctccattgggatcagggaagacttcccctgggaggtgacactgactttgagacttggagaaggacacatatttaaactcccagtggcaattcaccaccatgagtcagggaagttctggaataggagtcagaaccgacctggctttggtaccagctgggtaacctcgggcaagtcaattctcttctctgggccttagctgccccatctgtaaaacaggaacaattcaattggctttactgcaccacatggttatcatgaagataacagacgtgaaagatgtgcaagttctctgcggaacacaatgccagggaaagggcctgtttttgctgtgggcaaccagccatcctgacctaacgttttggaggctgaatgaggaaactctatctgaacatcaaaggcttaagacctttgccctggtgaagattaatcagcagaggaatgtggtgctaattacccagaatggaatactccaaagaaaagggcctggctcagtcagtctcaccgagctgcccttagacagggatatgtgattgggttcctcctgctgcagttttttcccattcacttggagttattttttgaaggaaagttcggcctaaggacctaaagctatgttacattagcattccggaggtcaatatttccagagctgctagaatcaggctgttctttcatactgtgtgggcgagagaggcagccacatcttggaaggagccagatgtacccacagtacaaagaacaagcgaatgagtgactggaattgggttttccagtgtgggaaggaagaagacagatccttccccaactcggggcctttggttggctgttaccctgtttggaatcctttttcggatccctgcatagtttccccctctcatcttcctgatctcagtgaagatgtcacttcctcagagaatcgatcctcccctgctccctggcttcaggcagcccctgctgttccctatcagatgcccttattcattttttttttttttgccttcacagcatttattcatattggaaggagtcttgttcatttatttgttaacttacatattatctgctcctttaccccccaacatacaatgtttttctaaaatccttaatcacctgggggtgtctgttaaaaatagactgacgtaaaatcagttaggcatggtggtgcgtctctgtagtcccagctacttgagaggctgaggcaggaggatcacctgagctgagatcatgcccctgtactccagcctgggtgacagagacagaccctgtatcagaaaaaaaaaaaaaattgatgggcttctcccctataaattctgattcaatagttctggtttggagtgagggattttttaaatcagcccttcccatcgttctgatctttggggagacttggaaagcacagatctggatgagagctctgtgaggggagggtcagctccatttccctctgtatcccatatttcccgggatccctggcctatgatcgtttgccataactctttattgaatgaatgaatgaacgaatgaatgagtccacatatatttttttttttggtggaactatcctttttcctgtttcgacaattcaatattcagacagggaacttgtcacttacaaggcacagcgttaggtgctgggacagctacaggataaagccagacatggcccttgccctcaaggagatgacagctgaggaaggggaacctgactcaatgcacgggattgcaataaaagaccgagaaaggaaagggtcatcagaggggcataaacaaagtgagttttgcgtggttgaaagggtggaaagcatccctttgcctacagatgatttatatggaagagtggcctgagataaccatagaagagatgagatttttagaaacagtatttttcttttgtcttatgcgttgatttgttgtaagttatacacacgtggctaaaaatattcgggtcatagataagggtgaagagtgagaagcagggctccctctctctttctgcaccccatcttccaggcctctcctcagagacagcctgctatcagatctcaggcatccttccaggcatattctgggcatatctaagcacccagttgtctagaatagacagggcatcagaggcagagatggtgaatcagggcatccaggggaaaggaagtaaggacatggaagctggaaaattctttggaatagagataagcagctcaccagtgacttagctttgtgactttgggccatgaactcataaatccaggaggatgggaagagggaggtcggtcaaggtattaggtgctttcctggcttgttggctggttaaaattcttggaacgtggagcacgagagagaggcaatgggagtgaggtagccaggggtcaacataaattaaaaattccagtctggcctggtggctcacacctgcaatcccaacactttgggaggctgaggtgggaggactgcttgagctcaggagttctacacctgcctaggtaacgtagcaagaccccaactctataatttttttaaaattagacagttgtggtggcgtgcattgaatattccaaatgctatattttaagagtgtgagatgcagatcctcatcaccactttttctactaaccttctgagcttcggtttcctcattggtaaaatgggtatagccccagagtgttgtcctgaggattaaagaagataacaaatgggaggcacagagccatgtatatagtagccttcctttatccctctcccgtgtcccacttcctggcaacccattccacctaagttgccagacttgcctttgtagagatctcagctacatcatttattagcaaggccacttttggtgagctgacccctcctcactcctggcacatagcgggtgcctacatgttcctgccccattttcgtctttccccagcatcatagcccacctaagagcgtaggagacattgctcttgctgttccaaagacatggcaaaagatgaaagcccgaaacactcatccccggccggaattataaaaacaaaactacttggatgtgaaaaatgcagtcatgtttccccggctggttaaaatatttgatgctcatagaatattcaacaacaacaaaaaaggctctcactccatgcaccatcaaaaatgtaatgtaattatagtgatgttaaatatccccagctgttctgagatatttgaatcttaaatcaagcctgcctgtatacatcctgcagttgcagctggagatccacaccaagtaccatacaaacatagagctgggaaagttcagacaagaactctgggctagaacctccacatctgtttgttagaggctgggcctgacccccaaaactggtatgaggatcccccaacccgagatgttggcagccatgtgcctcaacagggctatgcaatctgacaggtcataagcatttatccaaatcatctttcaaatccatgtgcagggagcgtaaagagatagtgtaaaataaatggtaataaagtgaatcaacatgcgtctcactccagagcctttgaggtggttctataaatcaaattctttccataattttctctgtgagactgtgctgagaagcagaatcaaacctcatctgctttcctgagcagtagacttagatttatggatgtgagttcacagtggatgcccgtgccatttcaaagtggcaaaataattttcactgggaggggttccaagagaagattaaacccttcactttctaagatcagagtatcaacaactttcagatcagatatgccatcagaatcagatggggatggccagaatacatattttggaagaagagagagtttacagaggaacaaactgatattgctgtgatacaaaagtgtcatctgtaggcttaagaatgaatctccttacagtctatttcaagcttcccagtgacctgcggtgtgaccttgagcaactcaatctccctctctgatttttaattttgatcagagtactgaatggggaagaaacataaaagggctctgacctacccagagaggtgtgatatgaaaatgacataatgtttcttggctagaattgtaacaatatacagaaggccattgaagtctacttttgtacggccttaaaagtctttcttggaagaattgaggggaatcacctattttaatgatgataaggatgatgaagataatagtggtagctcacatttatttaggacctacacacctgtgctgtgcttttacatacaagagagcaggaacagtttctgtatttacactaaacatttatccacaaacactagcctatggctggctctcaataataaagggattaacatatgatttttaagttttgaaacagccctacacgaaaagtatggtctgtgtttcgcaaatgaggaaacaaaagcttatactaaaacatatcttggatttgaactcaagtcctcatgactgcaaatgtgcatgctctttctgtagctacatgaggaaggaatgcattggtgcgaggcagggtgtgtcttaggaagtccagtccaccctcctctttgccttgaatggctgggtgacttaggcctcaggatcctcctctgtaatatgagggcatgaaccaaatgagtctcagtaagggtaagcagctctctaacggccacccagccaacataatacctggcaaagctgggatttgaacttgagtctgtcgactcctgaggcagtctcctttctactccccctaaccacctcctttctaagtttctggagtccaaattcccaatcttgcattatgtaagtgtggttaaaatactcccaagctatttctgaaactagatgcatgtttgttacaaattctttcatttttttgaattttggacagattctgcttcaaaattacccagcctcgttcactaatgtggattcaggtctgtaatagaaagtgttttgtacatcagaaacaaatgaggcctctattaatttccaattcttgctgtaacaaattacacaaaccttaccggcttcaaacaacatacatttattaccttatagttctggaggtcagaagtctgaaatgagtcttaccagctaaaatcaaaggccggcaaggctgtgttctttctggaggctttagggcagaatctgtttccttggcttttccagcatctagaggccatccatcttccctaacttgtgccccctcttccatcttcaaagccatcaatgtaacactttcaaatctctttttctccaactctgtgtgtatgtgtgtgtgtgtgtgtgtgtgcttgtgtgtgtgtgtgtgtgacagatccttgccctgttgtccaggctggagtgtagtggtacaatcttggctcattataacctccgcctcccaggttcaggtgattctcctgcctcagcctccctagtagctgggactacagttgcctgccatcagacccgactaatttttgaatttttagtagagatggggtttcaccatgttggccagactggtcttgaactcctgacctcaagtgatctgccgcctcagcttcccaaagtgctgggattacaggcgtgaaccaccacgcccggcctctttctctctgacttctgcttccacagttccatctcctctcactctgattctcccacctccttttgtcacttttaaggacccatgattacactgggcccatccagataacccaggatattctccctatctcaaaatccttaacttaaaaatcacatctgcaaagtcccttttctacatagggtaatgtattcacagattctagggatgaggtcatgggcatctttaaggggccatcattcagcctacacatggcctttgcactttggtttgactgacaccccagctaggccctggccctctgttaaccctgctctggtgtggcagagggcttcccccagagcactgatgcttctgatattgcacattctcttgggttcactggggagcccagcatctctccccaggcacacttatttgcttcactttaggatgttcatcccacatgcacttttatagatccaatgaatcggtatggctgaaccacagggatccctccttatcagcattcacagggcttccaggagcccacagccctgtctctcaaagcgagtgtggtttgtggaccagcagcatctgtaccacctgggagcttgttagaaatgcaaatctcaggccttgccccaacctactgaatcagggtctctgttgagggcctagtaacccggacatgctcaagtttgagaagcgtagcccccttaaggactttgcaaccgtccattgccaactggagtgtggtgcaacagtttagtaccagttcttttctgcaaagtactcacaagcccatcactttttccctaagaacatcttccagggcaggtgaaatctcaaaccgacactgaccagcaacagaggtgctggaggaagcaaaggtatatggggccttaagagaccttaattcaaatgctggctcttcttgtattcctgtgctgagtgacctcaggcaagtcactcctacctctggagttaggcaggcaatagagtgtaatcagcatcctccattgctgcagagatagcaacgtacattatcacatcctatccaggtataataaattaagcttctgctgattacaaatgcaggtttgtctggccaaagctgcaccaagatctttttgtgggaacaattgtgatgcagtgcgttgactttggaaccctaagtcagggcttctgtgaccttgaccaaggtacggaaccacacagtgcctcagttttctttttggtatcagggacaaaagaatacgtttttgtctgctctgttgttagctgaaataaaataatgaatgtaaaagtgtctggcagaaagaaggagctcaataaacgtgtgtggaatcggaggaaacaatttacaaggcaaattaatagtataaacaatggtgtcaggggagatatttgacatgctcagaacaaacttcctgagtacgttagcagcctctatttgttttaccaacaattcatgttccaattatgagtgagtcatctatttgttagcacaggcccgagctggaactcagtttggcaccatttcctcatgcaggacttcaagttaccagtgtccttgaaagaatgaaaatagtgatttagttgaggttgtggcacaattaaaactttttttcacaactcctaggcagattctcctccatagatctacttctcttctgtttgtctgagggcagaggaggatgcaaattcattactgatcttgtcctcttacgaaccgtctttccttctcagggttgcaggtcttggaacccaggatgactctccaaagcctacagcaacttgcagtgaaaaaaacttcaaggcttggaagattgtgagtggtaccctctatgaaaggatttgttcttatcagcatctctgagtgttggcagaatggagccataggaaagaacatgggctttgaagctggactgatctttcgttgaatcgtgactctactacttcccagatgcatggctttgtacctccttgagcctcggctttctcatctgtaagcagggttccatgacactcattcatgctgttaaaattgaatgtgactgtttatgtaacaggtacccaatacaaatcctaggctgtttcattccagccccactccctgtatatcaggaagctccttttagactcagtcactccgatgaggcacattgactgttgcaagcctatttaccagaaacagatcagacttatggtcatcttggtgactcagtgcctggcacacagtaggtgcttaatgtgcattgactccaattgacatccaattgagtcaatgaaatttactcaatttctgagtagttcatccaagcaaatcacttaggagaatgaaggcaaccgacccgcgaagcaaatgtcctggctatttctccagcccttctccattgggcagacatttgattgatgccttcgtgactggccaaagtggccccaaaatagccactatcagaatcatcctgatgttggtcattttggatatctgcagacctgagtggagtttacatttgattccctaaactaatttccccgaagtcaaataactggtggaggtcttttcatgttccttgtataaatgtctatttaatcaccatcctgtctctagcacttcaataacttgtacatttccccccttaattactgtttcagctctgcaaagaaaagaaatggttggctgaaaaactcacgccatctgcactatttgagctctccattcccctgactgcccacttgaatacagaacttttcagctaaatcccgttgatcatttggctcatgccctcatattaaacaggagaatcctgaaaccaaagtcactcaactagccagggcaaagctgaggttgggctggacttcccaggacacaccctgcctcctactgatggactccttcctcatgcagctgcagaacgtgcatgtacctttgcagtcaggaggacttgggttcaaacccaagctttgtcacctgctgagtctgtgactttaggtggattacagatgctcccagcactgcagttcacccatttataaaatgtagattttcacacagtcttccagggttattgcacagaattgagatgacatgaaacatgcccagccagagtctggcacatcacagctgcccaatgctatttgcctttgtccttcactcaaaattctcaccgcaagtcataataatggaaatagctcacatttcctgagtgcttacttagggccaggaatgggtctaagcacctcacatgtattagcttatttattcctctttctctaaagacaaaagtatctttcttgattccctaaagctatccatcctcccaactactggactgcctggcctagtgccatttcaacagagttagctgattttaaacaatatgttgctgaaatgatttcttgctttctgtcctggcaagtagcagccagcttgtctgatgtgacaaaatgtgatgaaactaaatgctgttttcttcgctttcagtacatatgagtggtccaaaatctgaactcaaggttaactcttgcagagggggttgggcaatagtgaagggtgcagggaggagtggcttctcatagagttaggaacagggtggcagctggggtgtttgggacacagatgaggtctctctccacagtctaacaaccagtagtgaaagaagtcagagttttgctgcaaagttcaaaaactttagtttggtctccaggcacccactacataattgcatcgtcacccctcagcccagctcccatctcagcacatccagtccctccctccagccaccctgaactaggcgcggggcctagaatgcatgtgttcaatctcattatttcatgtctctgaactcttgcaatggactcctgtcctctcaccctgaagtcctctttctctccttttctactttggagcttctacttatccttcaagatttagctgagataccacctcctccaataaaccatcgaagatccccagtctgatccttggagcccacacagcacctctgtacgctcctggtatctattcacacacctctgtcctcaacatcactgagagctcccaaagggcatgtaccaagccttatttaattttataccccccagcagctagtacagaaacttagtatatagttgaccttcaagagacattggtcgattgaatgaatgaactggaaaatgagaaaatgagcatatatctctactcaggtaagtggtcataatatgatatgataattatatgaatagtaattatgaatagtaactatgaatactatgaatactatagtaaatatgaatagcaactgctaccatcagatgtcaagacactgagctgagcactttatccacattatgataatggctcttgaatattgagcacctactgctgtccaggcatgtgccagttattgctcatatgttatcttcacctcagatctccgaggcaggaattattaccagaggctcatggagcaaagtgtctgtccaaggcacagagctaggaaatggcagcaccaaagacccacgctgaggtctgcctggcactctcccctgaaccatgccatctgccagagagagagccattgctccttgttcctgcagaggacctcagattggcctctgttggtttctgttccaaccccctggttcttcttccaaagccccagtgctcagatagctctgcctcactgttttgcatcccacccaattactgggaaggctcccttcttctggcccaggaaaccccagaagggccagagtgtgcagagctcaagtccacagctgatgccagggaaacaacacaggcattcagaagccaagctgctttatctgactgctgagagattaactcttgcacagctgcaacaaagagaggagctgcaactaaacacatctcgagtgggcctagaggataagacccaacagacacccccctcccctgccaggtttctttccagaccatgggactaactggctgaaatgggacttagggacagctggcacttccccccaaaggcctcctctagaactccatctctcacctgttgctctagtcctcttaggattggggagcacaggtgtctggggagtgcttggcatcttgttttctactttcccttctctgttcccaaaaggaataaatgcccagaagtggcctggttctcactgaaatacatttcactggtgttctctagaggaattaagccaggagccttgttgcaggctacacaagacaacagggaatgttgggggtacctgatggaggtatgcattccccagtcctttcctgtcactacttgtcaagctgtctgttgggtgccggaggcagcaagtacatcagatatgattcctactctggtctggagggggagacaggcacagtctaacaggtgtgatgacatgtgcctgtgtgaggattgacatctaaacagggtggaagaggggcaagaaggggaaggcatcagttgtttggtgatgtggcatagatgcagcaggtggtcaggaaaggctccaaagcaggagaaaccccagagctgcctgttgagcaggcaggtgtcccccaggcagacaaagcagcatgaaaggggagttacagcagcagcggaaaccaaaccaagcagaggggcttgaggagcagggattcagctgttgggagctgttctgtagaccttgagtatatggtatgagggagggtgtggcaagaaataaagcaggaccaggtggagggtctgaggagctcaggtcttaatctgaggacagctgaaccactgaaaggtttgaagaagggaaaccatgtgctttgagcagtgctttagagactactctggctgtaaagcagacaatgggatgcagggtgttggctgggacagagcttgaggccaaaagaccagttaggaggctgatgtgattgaaaggaagcatttctataggagctcagcagagttttcagagctctctctgacacacacacacacacacacacacacacacacacacacacacacaactaatatggtgtatacagtattgttatctccattagatgatttaggaaactcaagaatagagagattaagtcacttgcccaagggcacatggtaagtggtagactcagaatttgagcccagtcagtgcagcttgagagttcatgttctcagccactacactttggtgccactccatcaaagatgacaaaggctagagacaaggcagtgtggttagaggaaaatattcctgacaggcctgctgtatatttggggctccctgaaatagcttctggcttctacagacagaggggtgaagcctttaattctgaggtccttggaaaaacctacagcatgcaactttaaggggctggatactcccaggactgggccatgataggaagccactaggggtcacctgagtctccaggaacacatacctttggggaatggaggtaatacttttgcttggatgtgtgtgtgcctgcaaactcttcaaacgcagggactcagagtacagggaggtaagagaagggtgtgccccagtgggaaggaccttactgtcttcaactccctaacaattgacccacacaactcatggccatgcctgctgcagaggttgaagtcaggtggctcctgaagggactgtgtcctctgcatgccacagggacatgttgccaagactctgatgacctgggccacatggggtggctccactttccactctcccagctcctaggagggacaggattcctaggagtagaggtgggggagagggcaagagtcctgtgtaagtcctctgagagaagagaggcccaaggtcagagaggaagggtacctgtggtttctgtgtaatgcaattagtggtatgcaaagttggactttgaacttgctggctctgagcattggacagctttttagagcttcatttttcttattttaaaaatgggaataaaactcattaacgcagggctgcggtgagtatcaaaagtgcatagtggctgttagaatgcaattccacacactttgcaaagcaatagtcagattttcagaattacatttgatgggccatgctgtaaaacttggagcaggagcgagggcctgttgctacttggatgtaaccttgaactttaatctaactcttgaggctgctaattagtgatcagcaaaaaaaacaataaacaacaagagatcgctgccctcattccttcagcttcgtggaactcagaattgtgcttggagtcctggaagaaatcacttagaagcatatgttaacagcatctcctacttgccaaagcagggagccatcaggtagatattctttaaaagccagctgaaaatctcaggaaataaggaatgttttcggagtggataattcagggctactaaatatacaagcttaaagcaaagccagcaggacaagattgaagccaggattgccttcctagacaaggaataatccaatcagccaatgagagacctggtctgaccggcatcatgccaacacttgttggaaccgtggcatctctttaccatcccaaaaaaagctttgtcagaaatgaggatctcaggagtgatgaatcagatctggtaaaatcaccatcatagcactaccaataaacacacacaccaaccttccctgcactagtggaaaagcccaaacccacctaagggacatttacacacgaatggctggacaggcatgcatcatgctggggcctggcaccagaactcctccaaggcagactgcacaaggcagataccttctgtccaacagctgcgttatccagacccacagcgtgggggaaccggcacagcaaatggtttacaaaccctaagcacagcttctcctggccgcggctgtttgcatccacatgcctgctaggatgctttctcaactccggagcaatcctccagaccagaagacccacacttacattttatgggggacggaggccaggtgaagggcccaaccctggcgcaccactgctcagttccgctggatgctcaagactcctgcattttgaaaaagtagccaaagcatgctgctgcctctcccaccaaactgtctacagcttcagtgttggttttctgggagtttcctcacaagttctcctagattctaagtgtttgggaactttgaagacataagctgcttcggatcgtaggcctgcttagggactctgcgtgattcccctgatgatccatttttcaagcgcttccttttttttttttttttttttaagagccgtctattggttttcccaaagacaagaagtccgcacttaagagatctacactccaaacacagagcagtttcttggagtcctgagggcctggagttgaggtcgggaagaaggaggctgactaatattcacagacgggaccataaggagtagaatgagggctttgggggctgacactggaaggaggggctgggacaggggagctcccactggtgggaggcgactcctcctacagttaagtccaagttcccacaacctgcaggagaagactcaggggacccaagaatgggttctgccttggcatcgtggagtggtaacactgcaagaggcctggggacagccccgagggggcggaacaccaggcctcctgactgccggggagtggggcgcagagggagcgggttcgcgcggagggcaactcacggaggagaagttgtgcggcccgcagagctcgccgcggtacttgcaggagagcagcatgtcctccagctggtggcccaggcggtccatgaaggcggcgctgattccctcgaagtggcgcggaggcaggaagaggcggaagtccgccagcttgcggaaccactggcggcgcggctcgtcgccccgcagcagctcgctgacaagcgggcgcgcggtgcggttgggcagcagcagcccgagccagtggccggcatagtagaggtcccccttggagaggcgcgggaagcgcagcgggttgttgttgcacacagtgacggcggggaagggtaactggcggctccactcgcggtgcacccgcgtgtgtgacgggaagctgagccagtagagcaagcggttcgaggaccaggacagcagcaagccgaaggatgtacagaaggccagcacccacagcgcccgccgctggaaggagcccccagccgccgtgcgcccggcacacatgtgccgcagcccgtgcagtttagcgcggctcagcgatggccgccccctgcgggcgacccctggcccctgcagcgcccgctcgccgcctctgccgcccccgggctgcccggcagccgccaacgccgcgggcgccggctcctcgcgggccatgcggaagcgtcccgggccggtgagcgcggctgcgggcagcccggctccgccaatccggctcattcattcagcccgcggctggcggcagcggcggcggccccggccgggcggagccgccatgggagtccgcagcagcagtggaagcagcagcagcggcagccgcgcgcagcccgcgccagggaagcgtgcgcccgaaaggagctccggtggcgcggcatgcccgcccggcgccgccgctgccgcctccgcgggcgcccgcccggggctgagcgccgcctcagcccgcagcccctggcagtggcctctcccgagcgcctcccaggctttcccggcccctggtcttcctggaggatgcccggcgcccggcactacttctggaggggtcccactgggagccgcctctccagtccctgggtgctgcgcccgccttccctcgtcctggacctcgggggaccctgagccgagtcccccctgccccgcctaaccccagcttttacgctggtcctgggagaagggccactcggccaccatgcctgatctggacatccccagggaccccaccagcccggcccgtagcccagcggtgctgggacacgggagagaaggcgccaaggaacgagcgcccccagaggcgcaccgcggctcctggctgggcgggcggggtgggtgtgtacgggggtgagtggtcgccttgccggctgccgccttctttcccttcccctccaggacccttccttgttactgctccctgggctgcgctcggcagagacctgcttaggcttccccaagtcctgcgcctaagtcctgccaggcgcccgctctcgcctggggctgagagcttctcagggcgtcctgcgggaggctgttcgccgccggggtccttcaaggatgctagccgcagggaagtgtcgcttctcgcctcggctctcccaggtgcctcgcgtctccagaaaagcccagccttgctgtctctcgcgtcttctctctgcccccgcggcgacaagagctggggactgcggggacccgccaacacctcccgggggtgacccggactcgctgctccgcgcgcccttctcctctcgagactccgagctcgcggtggccgtgacgccggctaagctccttccccggttgcccgggagaaccctctttgggccccaggcgaacttgggcagcggccgcgcgacgctggcgcggctgggctccgagcacctgctcctcagctcgctggccccgcggctccgggcgggcggggcggcggcggccgtgagcgccgtgcgctcctggagacgcggtgctgacgcgcccggctcctcctcgctgcattttaattcctggccactgtggccgctgcacaccgagcgggaagcctcttgctggagtcggccgggtgcgggggtggggtgtggtggggagcgggatggggatgcgctgtacagatgtgctcaggtgtatgggcttgtgggagagataagtagtataaccattgtgctgatgtggccccagtgtagacaggggtgagaggactcctgagggtgtgagatgggctgtagagagagcgagttgctgtgtagtgtgggcatttgaacacgattgcgagtgtggtgccaagtattgggtgtgcgtaggatgtgcattgtgtatgtgtgaatgggcatttctgtgaaactcttgaatgtgagcatgtctgcgggtggcgtgctgtggccattagagtgtggtgcatgcaggatgtagtgtctatggtgacgtgtatgttccgtgtgtgtatgtgtgcacttagtgagtcctgggtttgaaatgcatgtgttgatgtgtggatggatatcagggtttctagatgtggtgtgtggttggtgtgttttgtgtgtgtgtgtatgtgcatgtgttgtatgtaatgagtatgtgtgttgaggcattgcgagcagggtaggctcagtgcgacaatcctcccctcagcctcttagggacatcccatgtgtgtcccagccccttccctggaagtgcctactgctcagccctggcccagtctgccaagcacagctctccaagagggtgggaagggggagtaggacttccagggacaggagactccatctttcccattccccttgctgggacagggaacacttggagccccattactccatgagataaaggggttttccagacattatccggagagtagaatttggtggtggaggcagtgtgaagggactccaagggtgggaggatgctccagtggaagaaggaccaacgtgtgtatcctttggggagaggaggcttggggaagcagagatttgggtgtggagaggagttttaccgtctttgtaatgatgaattaggggcaatttggccagatctgttgaatgagctgtgggtttccaagcaggagagaagcagtgctgggatgggctttccctccccactgacctgagggcacccttacagcgtgatgactccctgcatctggtctctggagaagaggacctctgagcccctcatttcccactcacccacatacatacatccacacagtcacacatgtacaagcacacatatacacaaacacacacacacactacacatacaacacacatatacatgaacatacatgtataccaacatatacacttaaatgcatatatacccaatgcatactgcatacatacatacacacaacacacatacatatacacaacacacacacacctggaaacccttctcactcatctggggaaaaagctattgcagttgggcattgatgacagtttgctttgggtttggttgcttgaagatgtctgttgctggctttgaggggagggttctgaagctgcctgctgtactggggcctctaccaaaggctcatactccagtgctcccagcctggtctcaagggtcctggaaatgccacagtgacccgtgtcttggccaaggtggggtgacctagtgacctcagtgcagttactgatgaagcaaccaggacaagcatgtgccatcttccagcatcataaatctggagtggcatgaagctctattttataaaagcctttaaaacattttgggtttctgatgtgttcagctgttgtgggcttgctctttcctagctatttcccccttgaaatgtacatgtgctacttttgattgaccaactgtcttctctgccatgggatttcctgtgaattctccagatggtagctctttcagggagaggaggggtatcctgcttaggcctcaaggggccttgacacagaaatctagagaaagacacacgggcagctagtgactccaagcaatgattgatggctctctttatggcacatgtatgcagcacattctctatgcaacttgaaatactcccaccctcttctctgaccagttctttgaccagcccagtgaaattctgttctttcttcaaatcacagcttatgcattgcctcctaggtcaaggtttccttgattctcccagacaaacttgggtcatgtttttcctatgatcccagcataccttggaagattgatacctctaggatagcccttatcattgtttgtgtccaagcctttctgctggactatgacccgtttgcagacagggactacacctccttcatatttgtatccctacctcttagcacagtgacctagcacgttgatgaaacactgttaccggggaagaggaaaaaggagctagtatttcttgaacaactactatacgccaggtacagaactaggcacataaataaatgttatttaatttctcactccaactctgcgggggaggtattttggccttttttatacactatttgttttttagggatgagggtcttgttatgttgcccaggctggtcttgaactcctgggcttaagctgtcctcctgcctcagcctcagagtgctgggattacaggagtgtgctaccatgcctggctatttttaccattgttgatgcaaatccttggtgcatgcacaggatttgaatccaactctaactcatttcaaagtgcagggcttcccccctccatcatacttccttacaaaattatattattatgataataatataaatgtgggacttcctaagtgctagggcctcctgtaagtgttttacactaaaaacaagtatcatacatgctctaagtgtttaatcctcaaaatgaggcaaataccattttttctctactttaaagaggaggaaactttaaccacagagaggttaagttactcactttaagccacacagctaccagtcaggagagcaggctttgcccaggtagtcactccatccctgtgttctccagccctagtccacgctgcctcagttctcagaggtacttggacacaatagctcctgtggattagtgttaccatcctggaagactcccttggccagaaaaacaaattcatgaggcagaacaggggtgacccacataacctctccaccaagaaattagcatttagcattgtgatgtgccaatcataagtttttaggaaaatttcccttgtttatctctgaaacatctgttcaccatgcctggtgttctggcattctgtgtgatgttgtgtgcagtggcaggaaagtcttctggccagcctgccctcattctggggtataaccaccaccaccaccaccaccactgataagctgttttctctcattaaatgaatctgttgggaggggagatcaatgtaagtgaacacggttttctgtttttgtaatacaattttcagagctgacacttgtgtggcttgatcaggtttcactggatccctcagtgttcctgtttacctgctactcagaggctcagaattggaaagtatctgagatactacctaagcctccttcctgcccactgtaggaatccgttcaatacattccttcagtgacagtgtaatcaattctattctggaacatcttgctgtgtttaaagcttcttcctttcatcagattgaagtctgtctccatgtgaatttctcccatttctcctaatttatccatggggacccacacaaaaataactttggtatttctttcacatggaaactcttcaaactctttatagaatcagagcacgttgatgctgaaaggggtctagcagtccacctgctagtgaagtcctcaagaccatcctttcttctccaggctaaatgtcaccagttccttcaactgtttctcctgtagtttttgctcttgagataggctcttgggtgtgaatctcctcgcaatgtgatcctccagccctgtggagtataagcctaccaacccttttactcttgatctggtacttctagctcctgatatttctgcgggtggttgggggctcttgaccgtccccttgcttcaggaatttcatggaggtggtgggtggagagatgaaacagcaatgatgggttcttggtgtgctgcttagaatgctgtatgcactttcttttagggctgttatgcaaatggtgataagagccacattacttttaatattaaaattcactggccaggtgcagtggctcacgcctgtaatccagcactttgggaggccaagatgggcagattgcttgagctcaggagtttgagaccagcctgggcaacatggcaaaaccctgtctctacaaaaaacacaaaaaattacctggatgtggtggtgcacgtctgtagttctagttactcaggaggctgaagtggggggatcctgagcctgcaaggtcgagactgcagtgaactgtgatcatgccactgtactccagcctcgggcatcagagtgagaccctgtctcaaaataaataaataaataaataaataaataaataaataaataaataataaagtttattgatgttatgaggcacatgggcttttgtgggggtaactgtgaccctaaatcaatctcttttttcccctttctctgccttttttttttttttggtcttatttctgtagttttcgtggctctgtgtcagtctgcctccctctcccctcctgtctttcccttctcttcttctcttccctttttctctctccaactctgcctgaagctaggggtgctctctgatacctttttattatttatttatttatttatattatactttaagttttagggtacatgtgtacaatgtgcagttttgttacatacgtatacatgtgccatgttggtgtgctgcacccattaacttgtcatttatattaggtatatctcctaatgctatccctccccacttcccccaccccacgacaagcccttcctgtgtccaagtgttctcattgttcagttcccacctatgagtgagaacatgcggtgtttggttttctgtgcttgtgatagattgctgagaatgatggtttccagcttcatccatgtccctacaaaggacacaaactcatcattttttatggctgcatagtattccatggtgtatatgtgccacattttcttaatccagtctatcattaatggacctttgggttggttccaagtctttgctcttgtgaatagtgccgcaataaacatacgtgtgcatgtgtctttatagcagcatgatttataatcctttgggtatatacccagtaatgggatggctgggtcaaatggtatttctagttctagatccttgaggaatcaccacactgtcttccacaatggttgaactagtttacagtcccaccaacagtgtaaaagtgttcctatttctccacatcctctccagcacctgttgtttcctgagtttctaatgatcgccattctaactggtgtgagatggtatccaaatcatgagtgaactcccattcacaattgcttcaaagcgaataaaatacctaggaatccaatttacaagggatgtgaaggacctcttcaaggagaactacaaaccactgctcaacgaaataaaagaggacacaaacaaatggaagaacattccatgctcatggataagaggaatcaatattgtgaaaatggccatactgcccaaggtaatttatagattcaatgccatccacatcaagctaccaatgactttattcacagaattggaaaaaactactttaaagttcatatggaaccaaaaaagagcctgcatcccaagtcaatcctaagcgaaaagaacaaagctggaggcatcacacaacctgacttcaaactatactacaagactacagtaaccaaaacagcatggtactggtaccaaaacagagttatagaccaatgcaacagaacagagccatctgatacctttcagtcaatgctactggtggcatgtggggccctagaggtggccagtgttatagcatctaagcaaatgtccaggagtcatgatggggacacctgtactggtggaaggagagagaggacttctcccctgcggttttactcattgcacatggatattcctacacccttcccttccttccaccatggaactggcactggagttgttgttccttccttcctttcatgtgcttcagcatctccactgcctttctccctcactctgtttttttttgtacacgcttggcctcacctaattctctctttttctggggtcttttttagatgcaccaagtggttttttgcccttttagtcattctcattttacttgacttcaagctctcagctccctttcttctatcacaagcaattcccaggtataagaggtcaaagaaggggccatgaccaccaaaagaaagaacgtgggctagaaggaccaggtccagagtaaaaggagctaggaagctcatgctccacagggctggaggaagtgtggctgaagcgttgtggtccctgcttaatggagaaccctgtgaagtgggagctgggtataaaatataatttaaccctttcactttcagcggaggaagtcaaggtccagagttgggagagacttgctgtaaatcacaccggttgatactgataaagggcacaaccagaatccaggttccaacttctaactcattctctgctcaccctatgagaggatctttaaaaagaatccattttgaaattggtaacatattcacatgtttcaaaaaacacaaaagagtatctagtaaaaagtttctccaccccatccccagcccccacagccacccagttttcctccctggaggctcccaaagccatcaatttcttgcgtggtcttttagagatactttatgaatatacataagtgtacatagtctttatatgccctttttttctacacaaatggttgcagtcagtgaatgttgttgactaaagtaattgtatttcatgttcttcacaccttttttttttcagtattttcagctagtttatggttgccttcctttggcacctcatttcaacttctgttattttccttaacttctcatttcccattatcctgttttcccatccaaaaaggacagcaggtcctatgacaaggtggtacacaagcttgtcatcttatgatcagattttcccttaaccctttgctagataccctaatggatgaaagctctcatgtggataatcttaaacagcaggttatgcagatatttctgtttgcctctgaagtgcattatgttgtgtatttgcataagatttaattttcttgtcatatttttctcaggctaattataacacacgcaattgaatgtcctaagcacacagctcttcttggtctaggaagatggtccaaacatgccttggttggcagagagatccagtttaggattcagaagtttctgtaactaacatttagagtgggtaaaacataacagggagagaaccagaaggtgttagtgcaaaaagtcatcttaacgagcatgcagtttaactaagataggaaattgaggtaagtttagtgacttgtccctggtcactgagaagttgacataatgaagatgatgaggatgataatgatatttgatagttgacattgattgagcattatctgtaaggcactgtgctcagtgaacatgatttaactcattctttttattcatttatttatttatttatttatttattttagaaaaaaaaaatgatgtctcactctgttgcccaggcgggagtgcagtggtggtgatctcgactcacggcaacctccgcctcctcagttcaggagatcctcacacctcagcctcccaagtagctgggaccacaggtgtgcaccaccatgcctggctaatttttttttttttttgtattttttggtagagatagggtttcaccatgtcatcgaggctggtcttgaactcctgagttcaaacaatcctcctgcctcgatctcccaaagtgctaggattgcaggtgtgagccaccacgcctggccagacttaactcatgttatcttcacagcaactctatgaagtatgtcccaccattatagctctttaacatgaaaggaaactgaggcagaatgtggataagtgactagtctgtggctgggattcaaactcaagtagtttggctctagagcatcagaccttaattaaggtggctggaaattagctgaaagtaatgactatagtggttatttattgagcagttaatggatgttgggcactgtctttgatgttgagaatacaaagtccacttagatgtggtccttgctttagctctcagtttagtgggggacatgagaaagaaaatattaaatattcatatgaaatgttaattattaaaaggcaatttaaataaagcatgataaatgctttatcagggatgagcacagcatgctgggagggtcccagggagaggtctttttccctcaactggtctgagagccattgccatgcactttctctgttttctcctgagtttctccattcattcccatgttctcacatccactaacagggaatcctgttacctctgcccacgaggctcacctgggagccaggatctgagacaggcagaggcaacagcagcacagcttctccttcagatgtccagaccctcttcttcttcaacaatgtccatgtccttctcctcacaggggtttggtgttcctgaaggtgtcttgttgactggtggcatctactttctaagttcgggccaccttcataattaatgtctccttccctcagcatcccttgcctatcattgctttattatcagtttagataactgagttttggttgcagcattggctgtggtcataacgttagcagagaaatggagtctttcttgcacacttttctacccaatttgctgtcccatacacataacaaaactctcgttaaaatagttaagcgtaataaccttctccagcagtaaccatccactcatgtgacgaaaagatatgcagctaaaataggatttaatgaaatataaaacccaaggtagaatgaggcattttattcacaattcctttactgtccccttaactgtcttcagtcatgacttaatcatggctctcacctggctctcacctctgcttcagggagcactcactaaccagctcctaatctgtcttgcatacaggccctctgcagtggcttagagatttaaggccaagctgatgtgtcaaaagcctccattcaggctggctgcatttcctcctagccacagctctcctgtctcacccactaaggggttgtttactctctttcccttgtaaaagacctggccaaaccacttcctctggtttctctactcctagtttatcttccctgtctacccacaagaagagcagaaaggaagagttaatatattcttctgcagtcctgtggacctgtgtgattacccaaacagaagggaaggggaagagaaggcaggggagggaaggaagttaacacagagtacagccaggtatctaccaggtactattatgggcatcttggagtggtttctcaggacaactctgtcagttgaataatattatccctgttttacagatgaggacacagaagctttgtctttccaattctattctctctgattctggtttgaacatagattaaatcgtaatggccataatcccatactctaaccattcactaagcacttactagaatccagcactgaattaaccctcatttttcaggtgaaggaaatgagtctcagagaggtaaagttaactgcctggggtcacacagaatgtgccacccaggtggcagagccaggattccaactcaagtgtgattccaacatattggtaattattagaaaagcagaacacccagagtttagaaagagaaaagacaaagtgggtggtggcatagttcagagttttgcaaaaacccttgggggagatgaagaaagtgaaagcagaattttttggggcctgaagtgggttctcagtaatctgctgtagatctgggagctatgtttttccgagcttgggtgtaatgtcaccatcgggacagaactaaaactatacgagcccacttgtagggaagaggttcagggaggtacccataggttcaagtaccaggcttggctaagtaaattgcagaaggccacacaaaaacatttcctctttcaacatcgaagtgacattacacaccgacagcaactacatggccacaaagtaggaacacatctttacaaaccacagggtttcaacctagccccctttgtctcccttcctccattcctttcttttccttctccctctcacttttctctttccttgcttgtctcccttcctttcagttcttcctccctttttccctcttattttcccatctaccctccttcccttcctttcttccttctttccttcttctagacttcagccttgctttctccttttaaatcaatactttccttttcccagcagtgcttacgtttattcattcaatatttctcagcagcctatggcactaagacacaacattagattcaaaatggttttctgaaaattcttggagttataaaggcaagtgcctaacattggtaagtaataagagctatgaaaaaaaacagttcataccctttgacctagtgattccataccctagggttccccaaggaaataacctcaaagcaaagtaaaagtacaaaataattcacagtagagcttttcataatagagggaaaaaataacaaattgaaaacaaaacatttcacaggtccagtaatagaggaatggccaggcaaatgatggtgataccacgtcatctggaaattatgacactttaagaaaagaacatgacaaggatgccagtgttttgcattagatataaaaagtactgagtaaaaaaagatctgagtccaaagagcacatccaagcacatcacaacttcagtgaaacatttctttgaacatgaacaatggtcagaagagaatttaggcgagacagggtttagttacaaataggttctttgggtaaagttattaaaattttaggcaaacaaaccaaaatccaagcaagcttaccaggaccaagttaggaaaggtactttggaattagaagacttttctgtctctataaagtgttcttactgtaataggggccactgcatcctcggaccttttggttgacctgactgtcctccccagcctggcactgcccaccaaccagtaaaagtgagccacagatgctgctgcctgatgtggctgacctcattccccctggcctttgcccattctagtatgtttcctcctggcttttgactcctggatgcccctgccttatgaagctgtaccaggatccccgccttagtctcaatccattttaaacacaaaacccagcaatgagtcacatggtagatacatgaccagagagtgacccataataaaaacaaactcagatgcgaaactgtccccaatcaggtggtgttcccttgtgtcctttctgcttgtagtgcgtctgccgtctgttcttagtctccgcctggagacctggtttggtgcccttgacccttggctggatctccatagcttgaagggcctgagcattttctccagttacaactgtgcttccatctttaactacggttcgaattttctttggtgttagcacccgtgatgtgttttattttcagttgagcggcagtataaggagataagaaaaataccctttgaggaatcaaaatgcatgtcacaaaatccatactattaatagctttaattaattgaggctagtaacgtggcaggcatggtgctaggaactttgcatgcattatttcatttaactcccacggtatccctaacaaagtagatgttgtttttattggtaccaaggaagaatcaggctcagagatatcaaatggtttatttcagattaaacgcagattttgctgatatcaaatcctcttcccccggcctcctgcattacatgatacagccttccaggcaccagggattccacagcatggtttaagcatgagtgagcccttgtattttcatggagcctacttactcttactttatgcacgatcatgataacatgcttggttatttgtttttcacactttcagcagaatagaaatactatgttatgaaaacaaaaaggcttaagacgtaagaatactggtagctagaatgtatagccaacacctgacaacaaagaaggcaaaacaactaaaaaacataaaaaagatgtttaaaatgatgtcatttaatgttggggcaaactccacacatttcaaatagtcccgaatcttttagccccaaacaatagctgaaactcacaatgatgatcttgggccatcaagattacattttgttctgtataatccgcgtaaggatataggaaaggacaggatctattgcagaaggaatttcagccaaatggtttcattaaaaaaaagttgtgatgcttaaaggaataaataaatccttaattcttggacacattggctattcagaaaaatgacacttctttgtaagagagtctgaacaacaatttcattctctcattggccaattgtttcagcaatcaccatagataaaagcttccctatagccattttttctaatgagcaaacagttattattcgatacatggctcaatattcagaattggttacattgcagccagttgggttatgttgtcgatatttagtcattctataaaagggaatttcatggcatttaaatgtttctctctctttcctgtttcttaaactaaaaacaatgacagaccagtttttaccacatttttttccctgaaggaataaacgataaaagagaaatggaattctatttgagaaaacagttctaacgttcatgcctctatcagaaacattttagggttttgttccataggacttggaattctcaggcggtaagtgacagcagcattctgacttacagaggatgtcagaagctaatgtgtcctgtctattagcttcctgaatgcaaacttctcttggagtgttttttccccctagcctgtttttttccatttcacatacccacacattaatacagagaaatgttaaatgtctgccctgctttgtggagtattgacaatgtatccttttaaatttggaactgcagttttactcgtgggaagaggtattttggtcatgaatttgaagtctcttttttatctagaaagcttggacttatcctcaactaagccctcacttctcccacattccatccatcaccaagggctgtcgatgctccctcctaaatcattctcaagtgcatggcctgagatccattctcatcgctactaccttggttcagctcttgttgtctacagcctagagcttactctgttattatagctcttaactgggctccttgtctttgatttccttcctctccaatccattccccactctgccattgtaattatgtcattgctctgcttaaaatccgtcaatggcccttcatttcttactgtacacattcataatctgtgtgctgtgtcacacagtgtgttacaggaaatgtaggtattgatcctcacagcttttggggcaacgaggcaggcttggggcatcaggagccccagggactactcaagattgcagccctgtccttttgccccagtgtactgtatatatctatatattatatattttcttcttgaaaaaactccaggaagttctgggaaaggctagcttataaagcccttctcaccctggccccatccacctacaagactctcatgggacttcctaccctacaaacgctttgcctcagctagtaaagcctcttgctttcccaacttaaatccacatcacatttttacaacactatgactttgaacttgaggcctggatagtgttctccttatttctttacctggtggtcttctccttcttcttcttcctcctcctccttctcttcctcctcctcttccttcttcttcttcttcttcttcttcttctttttcttcttcgtcttcttttgatggagtctcactctgttgcctaggctggagtgctatgtcatgatcttggctcatcactgcaacctccacctcccacattgaagtcattctcctgcttaagcctcctgagcagctgggattataggccctcaccaccagtcctggctaatttttgtatttttagtagagacaggatttcaccatgttggccagactagtctcgaactcctgacttcaggtgatccacccgcctcagcctcccaaagtgctgggattacaggcataagccagcacacccgaccttctactcatcttcttagaccttgctcaacattccccttctctaaaactcttccttgcttctgcagacaggattaatcactccttcttttcttttccattgcaagctggtgggggaacttgaggaaggtattgaaactctctgagtcttaatttccttatttgaaaaatggagataataatacctgccttgcagggtcagcataaagattaaataacacatgtaaagcataaagcacagagcctgacatatagtaagtattcagtaaatatttgttgaataataaatggtggttgttaatattcactaccaatctcttgccagtgcacttatctcataattgtgcaacggttgttagctcctgttttaagattttcttattcatctcagtgccataggttctgctgtgctaggatgtcttttccatgaaggaaaggatcttgagtttgtacactggtatgttctaaatacctcaaacagtgcctggcacatagtagttcttttataaacaaattgataacagaactgataacagatttcttgcctgggatagaaaactaagctaattaaggagagtgattcaatggccttcagcttattatttcagaaatctctaaatttatgttttctttcactgatggcaaatttcaatgaccatgcatgattcctttaagccactacatcttcctcctcccctcttttcaaggggaagaaaaccctccctgaagttcaaggcctaggttctatatagtggacttgcttcatcctgcttccaagactttctgtgttatgctccttgctcttctacatcttctcttgccttaaccaaatcatttggacttcatggtggaatcaatgaatcaatccctgctgtactgtcttactatcctctcctcatcttgcctaagaccagcccagccagaaaccaaattctggttctagagccttgttcagtgcgtggaatactgtaggtattcaataactttgtgtcatcactgaacaaacgaatgaatgaaagatgaatgaaaaaaaggaagggaggtaggaggatagacaaaataatagaaaagaacaactctattcttctgatagatttaacctagatgacacacacaaaacattggttgagctggtttatttctggcaaaaggcagtactgcctacataccaacaacattatgaatcactttcataattaaggtaaagtgcctttttttgtgaaaaaaaagatggaataggtcacttcatggaacttgtcaatccgttcaatgataactatcgatctcctttgtcgggtagacagggtttgaactggctaccatatgggggtttggcattgaggtagccatgttctacgtatgttgaacagatttctctgattccaggctgataaatgcttgccacactgcaactagggataatgaagtggcaacggaccaattctgtttgattaaaaagctttcttccattcccaacgtttcctgattctgctgctacaacttggatcttttctcagatcttttttctgccaccaactccttttttttttctttcttctcttcctctttatcttcctcctttctcctctgctcgtagctcagatattgactttcaaaattcttggtcagatgtcgtagattgtctgcagacacacatctctttttcttcatataccccattaaaatgatagtaaaagaagaaaaaggaggattcttttaaagacaaagatgagacatcggtagattcaatatttcaatccatttttgaaaagcagaacataaatggcagaagagaggagctatgcactaaagtgctgcccaagggaggttcctacaaaactgagcctgagacagttcacataacagaatccacatacctaagatgctttctaggctgttgaacttagtctgtcccaaactgaattcatcatcttcctccttatcctcctctaccatcaccaccaccttcaccttcacctccacctccactgtccccttcctcctctcttctcctaatgtgttttcccctcttgtggcctttatcccaaaggatggcaatactgtccacaaagctgaagtacatccccgtgtccatcccttaaaaccccttgtgtagacttctattgtggtacacatcatttcacagtgcaaacatgtgctcctatatctgtgtccccagcagacagtgtgatcttagagcacattttattcttgacagtaatcttaaatttgaacacagtgcttggcaggtggtaggcattaattaaataaagatttggtgaagaagctcttctatctggaggttattttgtatctagaatgccatgactcctcccctccaccccatggagtcaagcaagatgatgtatttatcagtcaaaaatggtttcaaagttgagtaatagaataatattactaccatggtatcctatattatcaaagtatattgtatccctgtaatattaatactccgtattattgttataccattatttgatgcttgttcattgaagcctgggtgttttgatgtctctatgctacctcttaatccctttgatatccatttgtatggccagtctgtggtgataagagttgacatttatgcttgggggcagggcaaagtggtacttagaataccatctggcctgggtatcaggatctctagggtcatgccccaactctgccactaacttactctgtgcctttgtctctccaggaataggtccctcatctttaagatgacataatttgactagatgacctctagggtttgtgtttctctaagacttatacacatctaggctgatcattaacctcaaactagagcagctccagcctcgtcttcagagagaccttgagtgccaagattgcctccttaattcaggagatgaatgtgcattgacgaggacaaaggttagggactgtggtgctgatctgagggaatagcctggactttgatccttaggctcagaaccaagtaaaaaatgcctctgaagaagttggacactgactgtgcaagggtttgatccttaccttgtatcttctgctgttctctcttttaatgttttttctagaaggggaaaagtactcatatagagtccaagacacagcgtcttctcttggaacatgcacctgctgatttcagtgatgtttgcagtacacaagattacttgggggccaggaggaaaacttttcttatccaaatatatagatagatataggtaagagatagagatacataaatgtatatctatgtatatctatatctgcctctatatctatctacatatagttgcatttttatctcagtataatctggttcaagggctggagctttcttgggaatcacaaagcctgattttacagctttggttagagatgcagacctaggtaaacacagacctgccagagcccctctgggttcaaaagccctgaggaggaatggtacaaagctcagaccctctgcaagactccagttccatcctaggctggaaagagaaagagagggaggcagcgcatccttagttgggcacctgctgtgtgcaaggtgccaccctggctgctttgcatctcatctgattttttcaaccatgcttctaggtctctaggtatgactggcccatttcatagatcgggggagtgacatttagagagttgaaataacttgcttaatgttccacattaaacctgggatttaaattcaggtctacctgactccaaagactgtgctctttctactagatgatgtaccaccccatgtacattctggttgctcctagcaattgtgtgtgtttgtatgtgtgtgtgtctgtctgtctatctgtgtgtgtgtgtgtgtgtgtgtgtgtgtagatgtgtgtaggtggtggaggaatagtcagggtaggggaatgcagggcagcccagtttcttctgagcatatattcaaatcacaggtaggaaactgctaattcttcatgtacctgtttgctctgctaggagctgagactctaggagtttgggagatggagagagaagttcttctcatccatgtttgggaagcacaactctatgtagcagcccaaggtgcaggtaggagtggggtggcaggtatcccagaaggaaagctagaggtctcctttgaacacagagaggagactcttccttgccatcagctcatccctaggcttctttcttaaccctgcttcttatttcacatattttctttggagaatcatctatttccctggtttcgactctcatctttttctcccaaacaccttcctcttgagtttctcagcaaatggctccaccatcagcaaatggctccaccatctccccagctttatgttgctgccatattgaaatactaaagcagtcttttcaagttccccttggccttcagaataaagttccaaccctgcagtggtctctgggagtgctgtcaagcatataaagacctaggtttgaatatcgattgtgcatcttattgcatatgtgaccttgggtgagccatgcaatctctcctgctttgtctccttatctttaatgtggagttaataatattgatactgtagatttctgtaaataatgaaataagtgagagcaatataggtaacctgttaaacctggtgtatagtgcctggtgtatagtaaacaagctttgaatggtagccattcttaaatggcagcattctaaactgttattgggacttttagtggggtgacacaggaagtatcatggtgtccaggtttctctgtaatgagagaatttcatttcaccatggatccaagttaggaagtgacctttctgccaaatgtagtctgttgttcttctctcaaagcacagtagagaaagcatcgtggaacccacccttagagccaatatggcagacatcagagaggacccagatgcagatcacttaaggtccgcaagatcaagcacagcagaactggccagccatgctatgagtaagaagagggatgagcggcaagggctgcacctacttagctttttggagagaagtaaatatatccataaagatcaccaagaaagagtcagtgtgggccaggtgcggtggctcatgcctgtaatcccagcacttggggaagttgaggcaggtggcttacctgaggtcgggagttcgagaccagcctgaccaacatggagaaaccctgtctctactaaaaaatacaaaaattagccaggcatggtggcgcatgcctgtaatcctggctcttcgggaagccgaggcaggagaatcacttgaacccaggaggcggaggttgcagtgagctgagattgcaccattgcactccaggctgtgcaatacaagtgaaattccttctcaagagagtcagtgtggaagcaaaaactcacgatcttccatattggtgaacaagaacctaaggtgaacagttagcataagagcagccctgggctggttgcagtgcctcacacctataatcctagtactttgggagaccaaggtgggaggattccttgagcccaagagttcaagaccagcctgggcaatgctgagcaatatagtgagagcccccatctcaacaaaattttttttttaaaaaattagccaggcatagtggtgtgtatctgtagtctcagctactcaggaggctgaggtgggcagggttgcttgagcccaggagtttgtggtttcagtgagctatgattgccgtcactgcactctgccctgggaaacagagcgaaaccctgtttgaaaaaaaaaaaagaaagaaggagaagaagaagatgagcagctctgcacactctgggaagaatcctgataggactcaaaatctttctttaaccacagtgtttaagagttattcttttcttaccctttaaaggaattggttgttccatcatctggtgtcatcatccgttgtgtggtttattatatataattaggtccaataaatgtttgtctttttcatcacaggaatgtggactttatcattctctacaaatccctgtgctttctccacaaagttcagagctaaaaactcctctggttattatgacatttgaataactgaacgatgggcccctgtgtgacatttgctaagaaatcccttctctggaaagctgattgaatctctgctctcatattttctttcttgtacttgcccattacacatgccgtttgaagaattccaattgttccctggcggaatcgaagtagaaagggacacttccgtatccggactagaatagctaagtgaggaagggccatccagagaagccagaagtgatggtggcagagacttggcctgacagagatgggaaagttcagacaagcagaaggtagggacagatgtcattggtgacccccttcttcatggagttctctcacagaggatgtgttattttttgtttccttaaggttgattaaccttgattatactttgattactcaaggttttgcttcctctgtggttatgtgtgggtggcactatcacagagaggaaaagcaatggggtctggagctagagacgtgggcttgcctttgtgtctatactctttgttatctgtcaggaccttgggccaagcatgggacaactcagaccctctgtcttttcattgaaaccttgctgaaaggctgcagggaggattaagggagctagcataggaaattctctgtactgtttttaacatgatactattaatttccttcttcctttctctttctttccataccagaccatgaggtggggactccctaagtgctattatctaagactgctgagctttctcaggacacaattccttgttggctgagcatgcatatttccaagaacttgggtattcttgagatgcggattccagcaaaagaatccatcattccatccctggtggacagggagaaagtgagatgtacatcactgtgcagaagaattcctagtacttcagttctgaaatgttctcactgaagtctgcccttctggggatggctgggaaagtaggggtttattatataacatggatttgatgtcaggattttcacattgagttttcattaccaggcctcataaaaagcagaagagctcagtgtaaaaggtttaaaaaaatatattttttacaaagataggcaagtcaggggctctgacacatccttcactctgtggttcttaagaacaaagacaaatggaaaagaacgattctatttttatgctttgaaagcacttactttaggtcaggaaaatagccagtgtggatgtttagtcttgtcaatatagcttggaccagacctttctttttcttcttcttcttttaattaattgggaagctggcaatgtagggaggtagggaggctgcatgagacacacagtcttgcctcatttcaaagggattaaggaaattggacctcttgtggcagagaaaaaagtaaataggctttggcatcagagaaacttcagttgaaatttcatttccattccttattatctgtgtgacccaaggcaagtcatttaaatcatttaagactctgagcttcagtcttctcatctgtataatgggggtaacacaaactaccttgcatattagagcaattaaatgtgatgtggtatgtcacaacagtgtctggtatctagtgggtactgaatgcacaattaaacaaatagctaaagcatgtaccaaaaatgtgcagaagaataatgttgctctctgcaagcacatctcaaacagaacccagggagggagaaaacatgggcctgcccgctatggctattattctgagatttattcagaataaagacatgaaagaagaatcaagtaagtagaaagcacattttgtgtgattattcttataaaccctgcatttgtattccaaaacgctttgggatatcttaaaataaaatataaggataaaatcaaaaaggaagctcaaagatgggaaagtacatatcgtgattgggctaacagaataactgagttcggagcttcctggtaaacaagtcaagtggagaaaagaatgggttaaatgattctcattatctgagaaagcacatgatcctgctgtttaagggaggaaattttttcttggcattacattcccaaaggaatttattacaaactcttaagaaatgtataatgcttcacttgatacttgatgcatatcatatacaacacagggaatgatgtcttccacaatgaccctcttacaagtgtgtttcttttgacctttgccatactgacccttgaagaaagccaatgaggatcagaaaccacagtggagtactggctttgacatcaaatagacttgggttcaaatcctggttcaatcactttctagttgcaagaccttgtgaatccattgactctcactgagccttattttcctcctctgcaacatggaactgataatagtgccctcccccttctgtggtattgctgtgtgcattgagtgagcacacaggtgtaaaacaccgagcttggagcctggtacaaagtagatgcttaataagttggatcaattttattccccttctttttgctagaaatgtaacctcatgtggttttttcctgggagtgtctaaactaatgagctaatttactttcagccttactatgtttagtttcatactctctaatcctccactggcatcagagagatggttctgaaatacagacctgaacatgtctctcctttgctgaacacgctacagtgtctctccgttgtctacaaaatgaagggcagattgcttggctggaagttcagatctcttcaccccaactctctctgctgtctacagccactgctctccaacaagtgctctgcgttctaggcattgcaaactattgacctgtccatgcatatataatgcctttgcaccacgccaggctaatttttgtatttttagtagagatgaggtttcgccatgttggccgggctggtcttgaactcctgacctcaagtcatccgcccatcttggtctcccaaagtgctgggattacaggcatgagacaccacgcctggccatcttcatgttttaagaaagccttttcttccatcctactcagtctgttagccccagtgaactagaaattaaagatttatgttactgataactatttttagataaaattttgagggcaaagctttgctggaaatatacacagtaattgtgtttactgatcatcgccactcccaaacagcaattcacggtataaaactcaagtaattagaacaataagcccaggttaattaaaatactgggtaacatttgggcaagaataaaatccactttggagattttccagacacacattcattttgtgtgcacttaattcaccctgggagctggtgctgacaaggtactacactctgtgctaatcagcactggtctgcctttaatcacgccctgcacatttctctttcctggctccaggaccagcttcagagacctgggtccagttgccgggagaacagcgcagcagttgcttaggcccgatcttgggtaccattcttgtgttattactaaccatgccacttgccttaacagttataggctggctaattaaagcaattaatcaagtcctcaagaagtttgcatgctgtttggagtttcttctgcctttgcccctacatctggtgcctgaggcctgcttcccttgcagtgctgtgattcccatgtttgtcagagtaccaggcatgctgtgagcagttcctcctgctgcaatcaagggttcatgtgagctctgagggtagaccttaaagggcaaccctccaaaatgctctcctgcgaaacctctgcctccaggttgggtgagcatctcctgtgccattcttcattgcttatacttgcattgtcaacatcctaatagatgtctttgagctctgtatggtcagactggtgtttttcactttgtattttcaaagctctgtccaagaccttcatctaagggacacccaatgaaaattccttctcctttttacaattcctttccacccaaatgactttcagcttaggagaataataaaaagtcgacagatgtttttcaaggccaggtactgtgctgagtaccatgtggaatcagagataaataagacctcactcttgtaggcaagaagtttacaatctagtagggagataaaacacattcaccgatgacagtaagacaagaatcccataaaagaaggtcagagaagataccacaggctctcagaacaagagaaaaacacagctgactaggaaatccaagaggacttcacggaggagatggaatttcagctgggcttttgatttttgtgaaatggatttggacgtgtggagatgagtgtgtgtgtgtgtgtgtgtgtgtgtgtgtgtgtgtgtgtgtaggatatgtttatatatgagcttgtaggtggggcaaggagaaaagattgagaagctcctagggaatgaaacctccagcataagcaaagtcaccgtctttaggaaagagctgacggtcgcatttgggtagagtctgacattcattacagagattaaacatcgttaaggcagcagctggcagcctccagcgacattgcggggtgggtggatttggaatttagcttccccttactgctttcctctttctcttcgagggggcttgccctcctccccttccttcccatttccagacatgctctttgggtttccagggccttcttgctttcttctctcgtctttaacaaagcctattcttaggaagagatataatcttctccatttgcatgtgagtttgggttccaggctgcctgctaccactgagcctgtcttaccatggaactgatttcgcctactgcagagctgtgatgaggatttggtgccaaaataaggtcctaatctgcactcagctttctttcactcctagaaattgatgacagtaagtgggttgcctccctgctgccctccctcgtttgggtgacacaccacaattgcacagccaaatagttttccaggggagaagctttctaagctcctgcccactgagcaacaggttttgtttctcatgactttaattaagggagtaaataaatatagcaggatgacttgcttttattttccttctttgctctagtgagagttctcaccgtgaggaaggtaaatcccctgagatcctggaggtgccctgtggagggtcgtgtgtgtaaggcaccctggggataaatggtagcttcccatctcttacaatggttggggacagctgcattgagcaggaaagaggacacaagaaggcccttttggttttgaagtttgagcgggaaaaagctgttccttttctggagagagctgatgattagggaaggaaagtgattccaggtcctcaaagaatggtcaccaggagcaaaactggggcagccagaaagatggagaaagtctgtgggaaggactaaaatggcaggccattaaaaactatgctcacgcctgtaatcccagcactttcggaagctgaggtgagcagatcccttgagatcaagagtttgagaccagcctgaccaacatggccaggtgtggtggcacatgcctgtagtcccagctactcaggaggctgaggcacgagaatcacttgaacccgggatgcggagcttgcagcgagccacagtcacaccactgcactccagtctgggtcacagagcgagactccgtctcaaaaaaataaacccccaaaaactagactttcatgcatccattggggtagttctggacatcttcagcactgagggagtggctcttcctgcttcaagggtccatagtatcccacatcaggattgggacacgtagctgcccaggacaatctattggtctgagaaggaccagctgatgacaaccacaccctaggacagccagtgatggatggggaagagtttgtgttttccctgtgttcatgtgggattcagaccaccctcctttaaaaaagttttaatttttaatttttatgggtacataatagatgcatatatttatgggttacatgagatattttgatacagccatacaatgtgtaataattatattggggtaaatggggtattcaccacctcaagcatttatcctttctttgtattataaacaatccagaagtagcttggactacaggtgcacaccaccacacctagctaattcttgtattttttgtagagatggggtttcaccatgttgccgtagctagtcttgaacttctgggctcaagcaatttaccctcctcggcctcccaaagtgctgggattagaggcatgagccactgtgcctggtctccattaattacttttaaatgtacagtaaattattgttgactatagtcactctgttgtactatcaaatactacatcgtattcatccctttcttggtctaggaaaactctaggatttgggggaaaaatctttggggaaggagctaagaacaaccaagcaaactcagggcctccagaggaagtaattcatgtgcaacctgggatgaatccctgggatgagtctaataaggagctcgtggagcagtaaaaagcaggagttaatagaagccacaccagcctcagcagcatctgacacccataccagccctgcgtgtgagaaaatgtttggataaaatcagaagctgaacatcttccaaacagacatttcctcccttctaagagggctctctataaaatcctcttgtaaattttgaggtatttttttaaggagaagctctgttactgtcttttttattaatgttgtttgttgaggcattcttatttcagctggtgggcttagcacagcctgagtctttcaagctttaaagggtttcatttttattgcgatagctcttggtgcctcactcttacggaaggagttaacaggcttcccacactatctcagcccaccctctggttctatagacaacaaaacagacctagggaaggtggtgggattgcccgaagtcagggagccagttggagacagagctggtgccagtgccaggttagtatggagttgaggtggacagtatcctgtttgagggttttgttgttattgttggttgcgaacacatcatctcgtcggctcattctgagtttagagttggttggattccataagtgatttgctttcctatgtggaactcttaagccatgatgtgtctgttctctattggagctacaaacacccatcttctctctccttgcttttcctggaaatgcagacttcatgaccactcaagtttctctcccctgaaaatcctatcctgtcaccccagggagttcatggctctctgtgcccactgcactcttataactgatttttttgtgggtgtcataaagtgcttgccatccttactctaccctgaggtcctgtaggcagtaccattcgttcttactgttgtatagtattctacactacaatttatttattcattctgcatggaaggtcacctcatcacttttcagtctgtggctactaggaatagcgctgctgtgaatatccttgttcaaggctttcggtgaacatatgtatccacttccgttgaatatatacctgggagcagaatggttatgtcacagggtagccacatgtttcactttagcagggtcgtgcttgtatgtctgtatctcagcacctagcacatagcaggcataaagtaactattagttgaataaatacgtgtgccattatttcctcgagcctaagtgtaatattttacatttaataaatggatgattagtttttgctgcagagctacaaaaaccttagtcttgcacattcttagcatgttaaagatagaggggaccatttaagttcacccattcatttttacaaatgtgaaacctgaggctcagaaaggaaatcaacttacccaggaatgcacagcatttttgtgtcagaactaaaacagaaaccaagcctctgtaaaaatataaaggcctgcttattgcttctgtgccacagtttaaaatgtttatcatttagttgcattaaaatacttattcctatgtagtacctctgggcacataaaagattaaagattatatttctagcatttattattattattattttgcttcttcctagagggaaccattttgcttcttgctggaggtaaggattaaaaacagctttttttagtcatcagaggaaacaggttgtgattaccctgtatcaaatttttggtagaaatgattccttcttacatggatcaaagatacatactaaactttcattatgcattttctttttgctgagtttacaaccccttaatgtgaagcatgctgccagcttaactagagcattgaaaatgtgcagctctccttcaagccattggcagattgcaggcaggctggtttggaccagacatttcacagcattagaagttaaactgtagtgggaacagtggtggtaacatccagtctcagtctacctgagacgccatggcttccctgtcagctgtctggatcctgggaaggaccacagtggatccatggctctgtgttccacccctagagagtgacacataacagtggtggaaccggtccagaatgaatgaaccctcttgtgcatctgctcttgaacacgtgggagtggagaaggtgggtttgtcttcatttccatccccactatcctagctcttgaacttcagatcttgggagatcagagactgaggcaggctgaaagtggagcaaagccagctctgtgtgtgggtgaggaatgagtctgaatcaccccggtctgccttccgagtgacagtagcaaagccagttggaaggaagatccaaatattgccaaaatccagccgaatgagagccttgttttcatggccctgctctggtggtttgccagaagagtcttcccttgagcaagtggaggtggtgatttgtaattcccatcggttcattgcagcatgcttctattaagtgcctgctgtgtgcccaattaatccaccgataggtacaagagaattagaattcttgacctctgccttcaataaacttaacaaccagtagaaagattcattcattcattcattcattcatccataattttctgaaagcctaccttgagctgtatacagaattaagtactgaagacagagatggttcagacccaatacctccttccaacaatgttactgtctaatagactgataggggagatgggtgccaacaaaatgaataagatggactgggagagcaggaagagcagagggagcaaagagaaggagcatctcacccaggctgggcacgagttggaggaggcttctcggaggaggcttctcagaggaggtagtacttgaatagcatcatgaaagatgagcaaagattagtgggaaaatgagctgatgtgtgtacagtgctcttttaggagtcagagatatctgaacaattagaatttagtacatggtatgataattcaagagaacaagggactggagtatttgagactgtgactatctcttatactttctgaacatacccacaaataaccagagaataatttaacaaacaagacataactgaactctcacatgctgctggtaggagtgcaaattagtacaactgttttggaaaactggcagtatttgctaaagtgaaacatatggctaccctatgacataaccattctgctcccaggtatatattcaacggaagtggatgcatatgttcaccgaaagccttgtacaaggatattcacagcagcactattcctactagccacagactggaaagtgctgaggtgaccttccatgcagaatgaataaataaattgcggtatagtcatacagtagagtactatacaacagtgagaatgaatgatccatgactacaggcaacaatatggaagagtctcacaaatctaaggttgagtgaaagaagccagacacaggcgggcacggtgcctcacgcctataatcccagcactttgggaggccaaggtggatggatcacttgaggtcaggagttcaagaccaacctggccaacttggtgaaacccctgtctctactaaaaatacaaaaattaggcagctgtggtggcagacgcctgtaatcccagctacttgggaggctgaggcaggagaatcacttgaacctgggaggcggaggttgcagtgagccaagattgtgccactgcactccagcctgggtgacagagtgagacttctctccccaccacacccccgccccaaaaaagaaataaaccagacacaaaagtgtgtgtactatatgattccatctttatataaggtacaaaaacaggcaaagctgatctatgctattataagtcagaacggtaattatagttgtagttggcagtgggagttactagaaacaagcgtggaaagtgtttcattggtgctggtaatattcttgtttttgctttgggcattagtaacatgaaggtgttcacttggtgagaattcagtgagcagtgtactctcttacatatatattatacagcaatcaaaagtcaaaaaccttctgtaatcttgggttagactctgggtcagaggcatattgtaagggctgtaggaatttggagtatgtaaaagatctcgatggtgaactgggtcctcctgtgttaaccatctctcacagagaaaattgggggctcctgagaggtttggtgcccttgtgtcattaaatcaagcactgtattttccctcagagaagacctcttctcattaatttggcctttgcagtggatgttactatttcagaagcagaacaaggttatggacagagcaagggtttttttttcacatggctaagtgtctgtgcattatcactgggcaacttgactctctgcccctcaatttccacatcaggtgaatgaggataacagtctggggctggtgttctgacagtgctgttcttatgattcactcctaaccccatttattgcctgcctgctggactgtagcaggatacagtatatgacagagccctgcaaatatgaggaggcattgtattctgacctggggctgggaggcaagggattccctaacctacctagatctgtgtgtacagaatcaagacaccaagactgggtgcctgctgcttcccgaggaagccttccactgggatatcattgctctcatctcagcatttcctgtcatcccttggccaagtcactgaacccacctttgtgttctcttctccccattaagagaggagcccagggatcagtcgttctaacagcatctttgacagcacaaagactgtttctgtctcccaaagaaaaaaaccatgggaaaggagatatgaagcccatgctaatcattcctacagacttccagcctgcctgctgcccttctcactccattcaccaggaatatcacaagagaaccaccctgaaaagagatgtgacataacttgccattgtccctgacagtctgggattcctgcccagtccagagccacaacagatagaggagaggggagggaagaagagggggtgaatgctgacttctttccgggctctgtgcttgatgctttccgcctgacatgctttccatcatcaggcacgtatctattgagtacctattagggtctgagcactggtgatgccacaagaaacaaacaaacaaacaaacaaacaagaaagctagatcttggctctgtggagctcatagtccagtgaggaaagcagacaataagcagatattcacacaaataactcaaaaaatgaacctgtgataactgatagggagaaggagaggaaggatgtctcagagcacaacacaaggtgacctaaacaggtttgggatagtaagagaaggctctgcagaggagacaactttaaagatggtacctgcaggctgaacagaagctgttggatggagaatatcagggaaacattctaggaagagaggatggcttgcatggagatcttgaggcagaaaggacaatggtgttcagaggaactaaaagaaggcctgactggctgaagggtggtgcatggggaatggagaatgccctgagagcaagacaggaatgcagtcaacatcaagatcacagaaggccttgggggtgcgaagacttagaaagtgattttaggagtgatgggtggcgatttaactaggataatggtacccttatacttgtggttttaaaaaggttactctgacctctcaatggaggacagagcagcaagtgggtatgagaaagattggtagaagatcatggctataatccaagcaaaggatgtggtggagtggattgaaggaggggcagtggtgatgggaaacagtggagagatttgaactatattttggtgttagaatgtataggatttgaggatggaaggaatggatgattatgactgctaggttttggccagtgcagttggggggctggtaacatcactactgagatcatccatttctgagatggggaaaacaaggaaaagctgataggtagagaatattataaattctgttttatcctacttaattctcaggagagcccttcctctgtagataagaaaattgagatccagagaggttaagaaacttggtcaaggtcacagagcaagtggtctaaatcttggcagcaagacattttttggtcatttcagagattgtatctgttgtgcattcctgcagcatgtcaccatttacagaatgatttcaaatatgtcatcccattttgatttttaccagtaaaaccctatgaggtaaacagagtaatcaccattatacccattttatgagcaaggaaatcgaggtcattaacttgaccaatatcagagatctatagctaatgtgaataagattgaaactctgggctctgtgaccaccagttcacgcatctttcccaactatccctcattgttatgtttgtcaaatagtggagtcagataaaatgcttgactggctaatgacaggcaatttatttaacctctctgagcctcaaattcttcacttatgaaatggagaaaataatatctgcctccatggtttgtcatgagaattcagtgaagagctgaatgtaaggcccttagtacctgacacaagcaagcactcagttgtctagcaatgaagccactgctgaatatacacttctcaacccaaacaccccttttcccttgaggaaaaccagcagctcccagagctggggagggcctgtagaattgctgatgaactttttccccaaagggcctcctattttctttattcgtattcaattaggacttttagcacagttttctctgtctcactgccttgtccccatttccaaagtcagtccattgctgacttttggcaattattcctgtgtaatttcttttactttgttcctttcttccacacccacaacactgctcagtgtagatcccattcccttcttccagacccatcacaataacctttaaatgtttaactcatctcccaagtgcttgcccaatttgggcatgtacaaatacttccccatattttctcattttctatataagaaagcctagacctcttagtcaatgagtcaggtatcattacagttacctatcagtttctctcaaactcacctcccagtgctattcaacagggagccttctcttcaaccaaaaaagccaacccatcatcttccttgtatcaccctcaatccctccaccacacttctgaccgtattgttcctcactctcagaatatcagcctccttcctttccaattatcttcccatttcttcaaggccccactcaagtcttgccttctttctgaagcctccctaattttccagacttgaaatgtcttcctccattgattctcaaagtgcttagtacagtttccaaggcttgagatttgggatggccttttattctctgttgcaactagagtgcccagcacagcatcctatacattggatagtcataaatatacagtagttacctggtatatgctttaagtcaatgaaaatccaagaaatgcatttatatattattcgtttgtttgattaaccacaatgaaatggattttccacctatcatgtactctgcactgcactggggatgtcagaatgaatgtgaccaattccctaccctcaaggagctagtgtattagaagacatggtgtgtaaatggacatatatattcaacgtaatacatgttgtagaaatataggatgccaaagtcgttcattagaaaagactcctacttcagactgaggcaaagccaggggtgtcatgagtataattgtgctccctggaaacatatgttgaagtcctaacttccagtagctgcgaatgtgacctgatttggaaatagggccgttgcagacgttatcaagttaagataaagtcatactggattagggtaggccctaatggctggtattcttataagtggagagaggcttggagatacacagcatatagggaagaaggccacatgacaatagaggcagagaatgaactggtgcaactccaagccaaagaagactgaggatggccagcaaccaccagaagcaaagaaagaagcaattccttatttcttagggctttcagaggaaatatagccctgctaacattttgatttttagatttctatctccagaactgtgggagaagccatttgttttaagtcactcagtttgcaacattttgttacagcagctctactaggaaataagtgctgatggtgactgaggaggagaatactgagttgaggagagccccttgaaatgacatccatcgtgttacaaaaagcacctggttgttctgggcacagtgagttaggaaagtgagaagtctgggttcagccaaccggggagaatggagggtgctggccatggtgctgatggagccattgagttggcaaaggtagctgggcaaagttgagaatcacgagccggatcaaagctacccagaattcagagggagttggatgatcctcacacttcctccttctctctctaaattctctctcttccattctcctcttccctcttctaatcaggatgctgtagatcttgatgcccatcccccatcacctgtaatctatttctgcctctggtgaccacgtttctgtgatagagacacaacctcttcagggggtacatgcgatacttgctttctctttcatccaccctttaaagaacgttaaaattgccttctctcaggatttcctctcatccactctcttttgcttcctgtctcccctttctcatgctgcaagaaaaatcaggccaaaaagctaaaaaataaaaccctcgtctccattttatcttttcttcagcacagttgttgtttatgaagtttttaaaatagaaattcagcaaatcccgtgatactaaccagatactatatatacatacatgtataaattaaattagtctccaggggataccctgctaaatatagtgattatgtgaatctgaatgttttcaaacacctttctcctcttgctatatttttcccctttcctggatccggagatggttctgctggaaaatctgggtggaaccttggctgactgactaaaagccttccttatttaagaatacacttctataagaggcaggaaaaaagctcagaattcaaggggaaataatggcaggaatggctaggtgataaggtcagagacagcatggagtagttgatagagtagctgcaggttcaaatcccagcaccattacttattgattgtgtgatggtggtaaaatcctttaccttcttacagtctcagcattctcaactgtgaaatgggggtattagggttcactttgaaggatattttaggaccagggatacatatatgcctaggagatagtaggtgcttgtaaagtggtagccattagtgtgattagactgtgaattcctccttggctgggaagttcatgacctataattctgttgggttaatgaggatagcaacctgcaggggataaggaggcctgagctaatgggtggaggacccagactctgtgttacagctgctcagacctcctttttcacaaatgagaaaattcatgcccaaatttcagaagtggcttggctaaggtcaaggtcatcacacagccaagatatccagtttgccagtaaaagtccccatagggtcaccagttatatggtggcattgtgtaacttctttctgaggagtatttacattttacatacaaacttggatcaagttcaagccttgggtctgtccttgacctctgtcccttaaccttaaacaaatcacttatcctctttcagttccagttttttttttccttcgccttcacaagggggattgtcattattgccatgaatgtttgtgaggatcagagacaatgagtctgtggaactatcaagaactatacccaggtaggtcattggatctgttcttttctcccaggaggagaatgtcttcagcagtgagaaggaggaacctacttggggcaagaggggaacgggctgtcctctcaccccctatggtttaggcatgaatgtgcattcctagatatcctacctgtccctgtaggaaaagggttgtgttctcatcatggctctgtatctggcttactttgtggtctgaggtcactttccctctcctgtgtttgtatgcatttatttttaatatatgaagggtagtgatggtgggatcagatgatctctaaatttgtgagcatactctcctgctgctgaagtcagtgctgctcattctgagggaagggcctttatcttcttgggattgagacatttaggcttattctagactcctcaccccatctgcttggtgagtctactggaaggggtgtctgaaactagacacctacagtctcccaagtttcccagctcattctgtgcttctcaagtggctggacttctggcctcttgcaggactgcagggaggctgctggggaccagcatcccacagagtcagtgacaaaccaggatcagaagaataaagtctgcgtgtattgagccagtctctgtacacagacattcaccacgatgagtcctcatgacaccttcgggctcagtcatattggcttcattttacagacaaggaaactggagcccatgcaatcacattattggaccagaccacacagctcctaaataagaggctaagccagcattcagacctgtctctacgactctaagtccatgctctttctaatactcctttttcctatccttgctgctggcctctcctgcattgtgctcttgctgcttctagtcctctttccctgcactgtcagttctttctttctttctttgtggatgggtttattctatttcataaggattgagtcataagaatagacttgcaaaggacctgtggggtcgacatcttcattttgtcaatgaggatcctggggtctagagagaatcctgactggcctagggtttgcaggcagttcaggacagaaacaaacattaagatccaggtattgtgctcggtgtgtttaatggactatcttaggtaatcccttagaccaggggtccccaacccctgggctacagactgatgcttgttatgaaccgggctgcacaggaggaggtgagtggcgggcaagtgaaacttaccatctagctccacctcctgttagatcagcagtggtgttagattcttctaggagcacaaaccctattgtgaactgcacatttgagggatctaggttaagcactctttatgagaatctaatgcctgatgatctgaggtggaaccatttcatcccacaaccacccaccctgccaacccagttcatggaaaaattctcttccacaaaactggtccctggtgccaaaatggttggggatcgctgctttggacaacactactaaagtagacgctattactaacattgtccacataaagaaactaaggctcaaagatgttaagatgttacatttaaggctgcacaggcttaattctgcagtcagaattcttagtctgtttgcttttgctcttaaaaccacagctatttcatgcttttaaaatcatagctatttcttgtttactctgtgggctgctgcctcagtttcttctgaataattagtttctgaaacactaaaagcatagaattgaaagactttttattctgctacattttttgggcctgcacttctgcacaggtctgtgttgattcatgagtaaaatataaccctttgttatgtcacataatagtaagccaaacccatatgttaaaaagagtagctaatatttattatgcatttctatatacctgatagtgtgctaggtatttctacatggataatatcatttagttcttacatcaacctattgttatccctattctacgatgagaaaatgaaggtttaggaaaggtaggcaactgcccgtagtcattctgctagaagcaatagagccagggtccaaactaggcaactgcgaataggacaaaactttcttaacattgactgcacatgaacatcacctgtggagcttttgaaaaataggacatcatacccttccctggaccaactgaatcagggcccctggggcatacatcatagaacattagtgttttttcaagctgatcaattggttctgattttagcagtgaaggctaaaagctactgctttacctgcagaggattctttacatctaaatgatgatgcctagttgaccaagtggtgcctgcattccatatacccgttcgtgttatgaagattaccttggcctctgactcccttcttggtgccagggaggctaatactagagctacttgctaccagcgctgccttacagaaatacaatgtgagacacacatgcaattttacattttctagtaaccctatttttaaaaaagttgaaagaaacaaacaaaattaatttttaaaacatgttttatctaacccaatatagacaaaataataacatttcaacgtgtaataaacaaaaaaagaatcactaggaccctttacatttttattttttggtatcgaatcttggcgatctggtgtgtgtgttgtatcctcacagcatgtcttatttcagaccagtcacattttcaagtgctcaagagacacatgtgctagtggttattggattggacaaggctgctttagatgactatctctggcttttgtttcctcttctaaagtctcagattcacggccaggcatggtggctcacgcttgtaatcccggcactttgggaggctg[134 bp omitted]gaggcaggagaatcacttgaacccaggaggtggaggctgcagtgagctgagattgcgccactgcactccagcctgggtgacagtgtgaaactccatctcaaaacaaaacaaataataaaaaaacaaagtctcagattcatacagaaattatagcagcatgcctaggagaggccttctctcattgaatttttctggccttccaggtgccaatctatcttgtaatctatatgtagcatgttcaatctacaataatcaatctctggtctcccaaaggcccattgcctcctgaggaaggaattggccttggggaaccttactttggcagggtgattggagactggccatccttcttcatgctcctgcctttgtttgtttgtttttaaaagtaaaatgtcttgaagaagcaatttggtgatataaatcaggagatataaaaaaatccattcactttgaccaagtaatttcacaaggaaataatctgaaatatggaggaagtttcaggcctagaggttcttatccgggccttatttatactataaaataattggatacaatccagatgtccagtgttcatatgatgattccaaaggctgtgggaaatcatgcacccattcaaaataacatcagagagttatcataaagagaacttcttatggtaaaatatgtgaagaaaagagcaagcaccaaattgtttgtgcagaattataagtatataaaaatatctcaactcagaataacagcaagagaatacaccaaggagtttaaagtagttatcttttggtggtatggtgatgagcaatttcttccttctttttttctacttctctgtgttttttgaaatacagtgagtacatattcctttcataataaaataagctttattataataaataaacaatgttaaggacaaaaaaaagcaattaaaaactttccactcttgcatgtgattagaaaatcatctgcctgtgcctataggctccaaggggaggagaaagggagaggaaagaggaggattatgggtataaaggctcctgtcccgccagggacagatttgcattttgcacactgatacatcatttctgacaatttggaaagtctttccccagacccctggactggggctgctccttaaacaaaaagccagtttgtgaggaagatgcctcttcagtggtgttggcacaacaaactctttcttcagcctggggctgcaaaatggatgcattcaatgccctcaggaagggactggacaaggaagctgctcagttgctcaaagtctaaaattaggtgtcccagaagcacaactattttctcttcccctaaagcagcagaatccttgtcttaggggactgagtttgaaaccttcaggacttccagagtctacatgttccaaaagggggcctccaatctctttatttcacaataagattggaggaggaagctttcactgaagcaacttatgaaagaggtgctaatgtacccatttcatagataatgaaactgaggctcagagaggttaagaaagtcattaaaggagtgaggggcatctgtgggattcaaattcaggtctgcctggatccagagctcatgcatgtccattgtgtgacactgtttgcctcctcttctcctacttctctctgcagcggcttcaggtgtgggaagagcatcctagaagatagaaaactttgctgttgaactggcttccagcatggaccaactgtccttttgtgaccacagccatctagtctgtcccaaagagaccctatcagtaatgtgtcatcctcaagttgagaggaagtttaaccaaagagggcattcttacagaaagggagtatctttagctctcacagaagaggggagataggtaatgcaattggtcagggttatttagaatgcaagcaactgctcctccttccaagatgagcaacccaacccaagaccacatgatggcttgtgtgtcatcctctcttgacatgtactgacaaagggtcctgtgtattccacaggtgatgggggtcgtctttttgcaggcaagcgcaagactaatgatgctttcagcagaagatggaggaataactaaggcaagctgcaaacgtgcaagctgtcagtgtgattcacagagtaattacagcataatacagtgtaaagtattaggagataataacaataagtcaggattgactcatcgctttgaaaacttggggctgatgaacctgccagttatttgctagttctcaaagtctgtaaaccagtgtcatgtgagccaatcctggcagctggattcaaaagagacaggtctattatccctttttacattaaattgtgagaatgcagcaatgggaaaatagaaatgcaagcagttaggatagcattagcgctagcgtccaggtaaaatgataattgtcaggcacttaaaatccccagaaatgatatgctcccagtccactgaaagctacaaacaaacccaaggcataatgatggacttgccttgttctaactagaaggaaaacaaaagtatagtaataatgaaggctagaattgctgaagtgcctactatgtgtcaggtaatttacatatattccattccagctaatcctcataaaatagtaggtgggaaagcttagtctcatttgggttgaagaaactgtgctttagatcatctaagcagcacagggaatgtcgcagagattgtaagtgtgggagatgggtttcaaacccaaatacaatgggcttcaaagtataggcatattctaccactccaggctgaatcttaggaggtagaagggtgagtcaataaatccatatgcgtggggacttacaggagaacctacacttgtgagggcctgcaaaaggaagcattccccgtggctaccaccagggtcaccaagtggatggcagaagcaggtccaagcagtggtaccacagctgagatgctgtagccacatagtcatgaacgtgaggatgtccgaggtcagaatcattgctcatacacttgaggagcacttacaccatgttagtacttggggccacaagggtgaataagactcagtccttacactccaggagcccagagttcagccttccagctccaatcgcagacacacaagtgctaatagactcacaggaggggaagggattaagcagcagaatctcctttgaataggggtgatatttgagtctccatgcttgatttctctcaccctccccttctccctctgtccttctgttcagcaaccccaatcctgtggaggggtgaggggctggggcagaagtggtcttggagagtcacagaccttggtctgcctcctgggtctgcctcccagatctgctgcttgttctgcttgggactttggatgctcccctcaccccaggatctctgaattatttcaaaactttaaaagggggtttagactctcagtatctctaggccagtcatttattccatgactctctttagccttccttcagagggaagaggaaggggcagtgtcaagccacattggaacctgaagcaaaaggagaaatcactcatactgatcccgtctctatttaaaatttggatgaccatgttcatcatgaatttcttaacagatttttttttaaagtactgcactaaaatgttgtttattttcgttgctgaaatttttggcacccctgaaattttgcgtctgagacaagtgccttcctcgcctcacactttttccagtcctgcggaaggaaactgaaatacatgagcacctactgtatgcaaggtaatttacagagattccccagtcccctgttgatcctcacgacagctgtgtggggagggtatcgtttagtcccattccacaggtgaaaatagtgaagttcagagaggttaggcgagttgctcaaggctgcctgtgtctggcggtgatcagcattttccaaggctctgtcagaaagttgaacactttctctctctatctctgtctttctctctggctagactccgactgattctacaaaacccggcccacttttgattatagcttaatctgtcagagaggagggggcggggcttctgttaactgatacaaaaaggagctggagggtcagctttgtcaatgcgctcgtggcagaggacccagaggctctgaatctacacaaatggccttggttcttgaggcagaaatattcctagagcagagaagggggattcatcagggtgcctgggctgcgtagaaatatctccagagaatgtccagctccgtttcttctaatttgggctctccaagcaccctccagagctggctttgtgctcctgggggtcctgccccctcacagagggccttggagataagtggccccagggtgcctgcttggttctgactccatttccactgtgtgggagcacactggcactccagtgaggtagcactgacagaaccaaaaagtgcttggactctgcatctaaaagacctagtttcaaatcccagctccaccaattaatagattaataagggctaccattcattgagtcctgcctgagccactttatatacatcagctcattgatcctcacaaggatcctacattttacagatgtggaaactgaggccctgaggaatgttgttgcccaaaggcatgtaatagtgatgacaggatgaggattttaaccttgcggtggtctgaatccaaagtccttgctgtgcttcctccaagccctgtgacctggtgccatttcctttacttctttgagcctcagtttgctcaactgttcaaaggggatagtaatgcttttagcattcttgtaaagatgtaatgagataattcgtttggcaaacattcattaggtgtttgctctgccactggcactgtgctaggcaaagagggtggagatgttctggaggggcaaggaggatggagatgtttctctgagatgttctggaagggcaaagagggtggaagtgttccttctgaggtgttctggaagggcaaagaaaatgtaagtgttccttctgaggtgttctggaagggcaaagaaaatgtaagtgttccttctgaggtgttctggaagggcaaagaaaatgtaagtgttccttctgaggtgttctggaagggcaaagaaagtggaagtgttccttctgaggtgttctggaagggcaaagaaggtggaagtgttccttctgaggtgttctggaagggcaaagaggatgcagatgtttctctgaggtgttctggaagggcaaagaaggtggaagtgttccttctaaggtgttctggaagggcaaagaggatggagatgttccttctgaggtgttctggcagggcagggaggatggagaggtttctctgaggtgctctggaatggcaaggaggctgtaaatgttccttctgagatgttctgtaatggcaaggagatggaaatgttccttctgaggtgttctggaagggaaaggaggatggtgaggtttctctgaggtgttctggaagggcaaggaggctggaaatgttccttctgaggtgctctggaagggcaaggagaatggagatgttcctttccattggcctctcatggagtattgggtaagacaggggagacagtagaattctggaagaagtgtatggcagaggttagtgctgggcttgtgggaggaacggcagaagtgggagaatcaggggtggcttcctggaggaggtgatatccagcttggatttttaagaaatgaggagaaggtaattccaggcagatggagcagcatgcaaatcacagagggaaaaaggaacaagatgtgtgcgtgcacgaatgatcagaggtggaatggctacagcgtgcattctcagcaggagggagagctgatagcaggacaaaaaaattgtcttttggggtaagaaggtaaacgatcttagacattcaatgatttgtgggtctccaaagggttacagtacacaaaatggataagtagtgtatctgtgacattaaaatttcttgggtggataagaggaaaaagctgtctaaaaagactataatatagatgaaccttaagaacactatgataagtggaaataagccagtcatagaaagaaaagcactgtgtgattccacttatatgtagcatctagagtagttgaactcatagaaatggaaagttgccaggggctggagggatggatcaatgggaagctatcctttaatggatacagagtttcagtttgggatgataaaaaagttatgggggttggttgtacgacaatatgaatatatttaacactactgaactgtacattgataaatggtcaagatggtaaattttatgtcttgtgttttttaccacgataaaaattaagttaaaaaaaaaggaaagaaaaaataaagcctttgcagggggcaacaatgaagaaaaggttgagaaacacagggctggagcacagggtgttggggaaggttggcttcaccctcagatgagcttgggaaggagagtgaggcaaagccctgcaagatcttgcctctcatgctcaatagactgaagtttcagttctacaggtctgggggcagcaaacttttcacgtagatatttttggctttgtgatccatatgttctactcaactctcctgttgtagagcaacagcagcccttggcaatatgcaaatgatgggcgaggctgtgttctaataaagctttatttacaaagatagatgtagctgcatttggcctgtggatcataggttgccaatccctgctattccctaggaaaatttcactcagggaattttgtttatattttaaaaagtcactttggcaatttatgcaaagactagattggagaaaggagtgcacagaaagggcccggcacggtgtcttgccctcagaaaggtggggtttccttttcttccctcatgccaggcagtgccttctaagtgggagtagaataagttgtctctctgaggctgcctcctctttctgaccttgcacaaaccaaaggctgtgatgactccctaactcctgacatcccaggaaagtaggagctgtaccactttgacatctttttagttgcagcaaaaagagataaaaccagatttggcagtggtgacacttggttgggtatctgatactttgctgtaggtcatttgttagcaaaatccatcacccgaccccaactgctgcctctgaccctgagtcacctcccacacacccctgcatttcatagctttgattcattaactccaactgctggaattacaggtaacactcagagttgcattctaagtgggcaaggatggctgctttgaaagtgggctttctagaaaggttaatattataaatacatcttaaatgcctaatacataaccaattgccacaaatgtggaaatgtcagcagcgttaaaactcagaaagcaagaaagaaacaggtcacctttgctcttggtatattgtattttcaactgggctggagaaatgcctttagtctcttggagcagtgggccactcctggaagctggagtgggccaggaaggaaaagacctctgagggtgatggggagtgggagcatgatgagagaccagtctcttaagctgccagagtgttagtttcctcagatgcaaagtagggatgataattataataaggtccagaaagttcttaattaactacaaatctaccataaatgttggatactgctctcttttttttctagcaactaggtcagcgcttggcacacagcaagtgctcaataaatgctctttcctatcgtttttcttcccataagccttgaggttggctaacattagtttagacagatacgaaaatatcagatatgacctccctcaggtgtgcttgggttttctgggagatgatgttaaagagaaacttttctgagatttgaaggagaactttgagtgtatcagtggtttagggagggaggtgcttataatcctcaaattagaccacagagggggctcctgcatcatcaaacgggctctgtatatgtgtgtctctgtgtgtgttggggcagcagagtgtgtgagcaagtgctgtgtgtgaatgaatatgttcacgtgtgtatggatggatatgccagggctagtatgaggcctgcgaggtgtccagggtgcatcatttagggaggaactcactctcagggaatgaccctgtacttgcatgagcccaagagttattgcctcctggaatgtagtatctttcacacctcaccctagtctcagacttgagatagtcatgtgtggatagagaagggatatcatttaaactgcagttgacaaggaagagccaatccccttgtcctaaagagccttccaaaacaaggatgaatttccttaagttttggatttgcagcgatctttaaggtatccaatccagtggtaatcaaatgttagtgtgcatcagaatcaaccgaggagcgcttgtgaaaccttcacattcccagaccccatctccaagattctgatttggtcggtcaaggctgagggacctggaatctgcatgtttaacatgaacgctttccccattccaggtaattttgacatgggctgtccaggaccaaccatggagaaactcttcttagaattggagtgaccacataattcatcatccaatccaagccactttggagagtgaaatgaatttgttgtagtttaaatcaggagttggcaaaccgtgactgtttttgtaaataacattttactggaacacagccacgctcatttgtttaggcattgtctacggttgcttttaaactacaatgctagagttgagtggttgcaacagagaccccatgacttgcaaagcataacatatttattatctagtcccttacaaaaacagttgtcaacctcaggtttggattattattcagtaaatatttacccccatacctagtagctaccttaactatagtttaatcttcctttcacttagaaggatcttgaagcccagagtggttagagtttgggcaagcatattttggacaatacttggatgtctcattctaagttgggttgtggatacacagttgagaaacctctaaaaggatgcctagtggctgttgggataaactagagggggctctgaggaaggttgggttaagttgaaggtttgccctggctactgatgcccctttgtcattctcagactgacactcagacctaccttagactgacatctcttgagatgaatgctccccacccactcctgaacaaataaatagcaagaaaatgcaaacagagggaagtcgcatcaagaataattacagagcagtcacatattttgatttaaacttaatgttgcttagcaaaagagaatgtgctgtgaacaaacagagatcaattcacaccactatcaagtggcaggtggtattagtagaagatggccttaaacctctctgggagcctcaacaataccactcacatggtgcagaaggataaggtccctcccaggaggctcctcataaggaagttagcaaaggggaagcagccacttgtgaaatccttactcattgttagggctttgaactgcaaattggctttttgtggagagtcgagtgtgtgtgtgtgtacatgtgtgtgtgtacgtgtgtgtgtgtacgtgtgtgtgtgtgctgacagacacatttgtgcaggtttatgtgtgtgtgttttgtaagcatgtggttcttgtgtgtttgtaagtctatatgagttcacatgtacatacatgcatgtggtatgtatatgattatgtgcatgtgtgttttctattacctgatgttgctagggcctgtcttcttgcctgctgtgctcccaatagcctgaccattcctgggggaatcacatgatggtcctactctccattgactaagtccacattatgacacgactgattattaactctcaatccagtctgcttagcccccaactctggtttgggggcttgcaagatatggaggtcaccttccttgatgcatgcagcctcatcggatcacttttgcttatctgatgatggcagagtttctgggcaaagctcagatcttctccacagctgcccctccacacctcctcattcattccagattgagtttgccttggtggttaatccccatgatgctgttccatcatccccttcaggaatggccaggatagagccaggtgggcagggcaggctctagggactcggttggatgggcctccaatgctactcaggtggaccagaagcatgcacatccaaggggcatatgtgaactttagctaaataggtgagctgaggtcagcattcagaagtagcttcaagcaacaggtctgaaggataagaggaaggctaagtctggtcagggaataggagcgagcaatcctcattccaaattgtagcaggagagaggcaaagcagacaaagacaaaaagctgtgagcccctcggagaggctgagagcccagatgggtcctgcccaggtgatccagggccaggacaacccacttacacgttcagggctagaccaggctgacctaaaaggctctcctccaggaagcttcccctaacaaagtccctttattcttctacactcagaggacttctgctccctcttctaatcctctctgatgtagttccgtgattcttaatagattccactggcttctccaagaatttgcctaacttccttggacacttcctcgcctctggacattagctgcttatggtccaatccactccctgatgcctgtcattggcttcctcactttattactggttttcgcatgtgtccaaatcttacctctctagccagactaaaagctcccctgacatggggggagtctacggcttgttttttcctatgccattcgcttgtatgtactcaagccatctcttctaactggtgggttgacatggctttgggtatcataaagcctttcgtacatgagagactttcagcctcagccttattttcttccctctgcattttccagtctgtgttcacttctgtgttcacttccactccatggcccccaggctcagccctgcctaattcttgaaccaactctggctcctctcattatcactacccccaatctgctcatcaaaatgaaatccgatctcttctctgtgtgaaagtcatgggggaatccccacagaagcccctgaaaagcgactgtgcctttgcccagactttgtcccgtctacctggaccgccctgtgtcttgcaaatattcaccatttgtcaaggcttgaattcatcacctcctcttcgaagccttcccagatacctccaggctgagttgcgtgttccagcaactgtcctgccctgacgtgagtctcagcttcacaaaagcacttagcacaacatggcgtcaaaattgggttaatgtccaacttccccagcagataattggttagttgagggcagggatcatgtttcaaccatctttgtaattctctgtcatgcattccccagtgcccaatacagggtggatgctcagtaaatattttgaatgacccccaggactggttgctagaggaggccagcttttctctgaagcagggggagcagatgcctgttgtcaggtggtcattggcagggacgtacagatttggaaaatgaagactcttcctgcagcagcatccaggcacatacaggccagttggctgtcatttttacctggcagggagcggggcaccaggaatgtctggagcagatagtagcttcctgggacacgacaggtggaatcagcttctagtgaaggaagaacctggtcagaacaactgaattataatcctgacctggccacttaccactgcatagccccaagccaaggatttactctccctgggcttcagtttccttgtctgtaaactgaggctaaaaagtccctgtcttgcagggtgggaatgaaagttaaatgagatagtgtgttgaatcagtgttcacagggcttccttgtttatagtagatctctctgtggtctctcctcccacttaaccctgctcacacattttttcaggttattaacccactactttaagaatgtatatatttatttgcatctgggagacaggccactctttggggacagagaccatgtcttagctctgtattcttggtgtctggcctatataggggccaacatttactcttgaatgaatgaatataaatggctagttgggagagtcatgccactatatatgcaacaaaaccttggtttttttttttttagctggggacagcggcttgaattaacaaaccaaaagaacatttctaaagcaaaacaaacaaagtttaaaaagaactttccaatttataagccaccactggaactcctgactaccaaaatgtttccagatagaggtcttgccaagaaggctgtcatgtgcagataaggctcatttgtaattagtaagtgtccatttgcattcaaatgcagtaaggggctccagttcttaaaaagaatctgttctccagagtagtctaaacatgacccatgcaatgtcagagattagcagtttttccccttagtaacattctttggtgcatttctccaataaatatttattaagttctttctgagtgtcaggtatgattcgaggcactgagaaagtaccgatgggcaaggcaagatccctatcctcacatatgttatgattcagtgacaggagatggtcaataaacaaataagtaagaaaaatgtgaatggaaaatatggggggcctatgcctcttcttggaggctgggctcccttaagaaaaaaaagacaatatggagcagagatttaaaacagggtgatgtgcttgagttattgggtggctgcttttgattgggtggtcagaccaggagaagaggaaatcccaaacagagagaaaatctggtacaaatgctgtgaggtggaaagaggtttacatattcaagttgggaacaaggaagaagacaaacgcaaatgaaattggcaaggaaagcaaagactgaatcatacagggcattatcattcctggggaacagattctggatatggttccaagggcaacaggtaggtttaaatgggagtgatatgatctgacacgtctttaaaaagatctcttgggtgcttgcatggagaccaggaatgaaaggcaccaaaaatgaaagccagagaccagttaggaggtaattccagtagaatgatgagaaatgatggtggcttggagtaaggtgttgacagcagagacagaaacaaggaggccaggcgtggtggctaaacacctgtaatcccagcactgtgtgaggccaaggtaggagaatcatttgaggtcagaagctcaagaccagcctgggcaacatggcaaaaccccatctttactaaaaatacaaaaattagtcaggcatggtcgtgggcgtctgtaatctcagctacttgagaggctgaggcactagaattgcttgaacctgggaggcggaggttgcaatgaaccgagattgtgccactgcactccagcctgggtgacagagagagattccctctcaaaaaaaaaaaaaaaaaaaaaaaaaaaagagagagagagaaaaggaacataaagacacctatgtacattttccaatgtattttggaagcagaatcaagagcctttggtgattggttggctggaggagagggcagtgagtcagagaggagtagaagggaacttcaagatatttaatttagcttgtgtcagcgtaacagtggtggtattttctgagatagaaagaatcgggtggggtggatatttgggattttctatgtgtatatgaaaatgcgtgggtatgcacacctgtgtatgtgtgtgcacatgctcgtgcacatgtgcctgtgtggtagaaactggagtattctgggatcaagagttttgctctggccacatcaagtttgagatacctgttaggcatccgtgcaaagatatcaagcaggccactggatatttgcaacttgagctcagataagagattaaagctgaagatatagatctgggagttgtttgcatgtagattactaagggaaatgaacatagataggaaagagaagaaccccagactgagccctgaggtgcttcaatatttggagtttcagcaaagaaggaagaacttacaaagaagagcaagaccgaggagccagtgaagtggggatgagacctgaaagtcaccaaagcctagagcggaaagtgttccaggaaagagcaataggagggggaaatgtggacagtacagacaccttttcaaaaaagttttgctgtgaagagaaatagacacggagcagctgctgaagagtttgatggagtgtgtgtgcttcatacagatgatttggaaagacctttgcacaccaaaggaaatgatgctagaggaaaggaggaatggacggtgagtgggaggtggaattatagaagcaagctcttgggaaggaaagatgaatgggaaccaaaacacaagaggaggggtggcctttgaaggagtggggacacttcattcatagagacacgaggaaaggcagagaagatggattcacatgagcatcttttcagtatggaaatcttagagagtgtctacctaattgcattcaagtatgtgataaggatcgttgctgttgcctctgagtatgtgtgtaagtatttttgggggaagggtgcaggagtttttgagtagagtaaaaggtatgaaacagtcgttacaaagaataggcaagtgaacctactaggagagtgtgtaggattgccaggcaacaccaagtgccggtttgagtcttctggccatgaatttaaagttagacaaataaatgtgtgtgggaaagaaattcaaagtgtttggtagagagtgggtgttaggacaaagcatatgatcaaagaaagattctaagaagggtcctgggggtgagatgtataggatcactaatttaaaagcccggatgaggtctcagaattgctgaaacagaaacatcgaaggagggtgggggctggtaggatatgaagttgtcatcagagcagatacttaagtcaacatttttcaaaggtgatgcagtcattggcaatgacaaggtcaaaattatgaccatgggtagcggaggcagggtgggtaaaaatggattgttatgctgggcatggttgttcatgcctgtaatctcagcactttgggaggccgagatgggtggatcacttgaggccgggagttcaagaccagcctggccaacatggtgaaaccctatctgtactaaaaatacaaaagttagccaggcatggtggtgcacacctgtagtcccagctacttgggaggctgaggtagaagaatcgcttgaacccaggaagtagaggttgcagtgagccgagatggcactgctgcactccagcctgtgtgacagtgaggctctgtctcaaacaaacaaacaaacaaaaatggattgttggaggaaataaggtcaacaaactgagaggccaaagcatggatggaccttctacgtggatttagcagtcgctgtgaatgatgatagaaatattaggacccaatgagactggtgaagggggctttgatccaggtagaagcaacaaggagttctaggtggtggaaaacaaaggctgatgacactaacttccaaagaactctgcgtgtgtatgtgtgtgtgtggaggagatatatggttaggaggccacaaatgggagcaagaagcagaacagcaaaccctctttaaccctagattacaggcacatgagagaaaaaacatctccactcacgagttgcaggtgatgctgttgtctggaatgggcttaggacaagaacctgaaaggaatattcagggaagggtggtagttgttggggtatttgctgcccgcagatcatgagcttcagagggcacaacaccagggtgagagggttaggaaattgggtgagattagggtgcatggagcagtgaggggatgaggctttatgatgatggacactgagagggcatgggatgtagtggggatctcagctgaacagaggtgtgggactgataggattgggcctgtgagtcccttgggagaagatgggttcaagctggtctcttctctcctgaggttgcatagtggtggtcaaaggggtggggtttaggtggtaccttgtgcaaaaggtaccacctaacctagagcagggatctcatgtgtccccagcccagaccaccgaggtcaataagcaaagcaggctgggccacgactgtgggaaacctgatcggtgcttcccagtctccaacaggcaaacaaatccactagggatcctgtttgaatgcagactcttattcagtagctctgggattgatcccgagattctgtgtttctgaaagtgctgggtgacactcttattactgatctatggaccacactttgagtagtgaagactggagagtctgtggtctgctgaaaggagcggctgcttctcacctgtacctattgttgtcatatgagagagaaggctcactatggtcttctgatttctgaagagaagccagaaatctggatttttatgtaaaatcatcccatttaagaatattggcaaataattaaaaatgtaaaatgctctgtggaccaaataaaacatgtgtgagggttgaattctgcttataacaccactgcttgtgatttctgatggagaggaatccaggcagagtgagtatcaggtgagcactggactggggtcagttattatgggtcacagagtcagcttggcctttggcactagaggtcaccattcgtaaggcaccttgatgttgaaaaacagttctccaggcatgtgggctgatgccctaccaggccaccttcattcttacctccccaagaactttgttcttcctgctcccctcatcccgaatgccctccagctccacccaaagccgaatctatcccactgactttcaaagtggtttaggtggcagagtgcctggaagcttcagttttctttgtgaaatgccatgaaatattgacatatttaattccatcactcataccagaaatgatttttctagcaggaaatacagctgtattatatgtactcaagtctctgcaactcaaaaagaaaataatcacacataaaatattttgaagaaaacacattcctggtttcccattagcatttattcccacttgtttcattctttgtgtcacttccagcactgactagtagataagtggtagtcggcactcaaaatttaagaacaatttatgaaaaaaaaagccttgatatagagaaagtatctattcattaagctaatgtgttctgggaattggaacttcttttattctatttagtggtgaaaactctcagtcttccttgtgggatggtagtgttccaagaaagactgggccgacaatttgcccatgtcttatcggttcttcacagtcggtggagacccaccttccctattgagtctccttggattctacctgttcctttttatcatccatatgactgaggtgctatgccccaaacatgtatttatttcctgattacatgtcatcttaggtcggtgtggcatgtgtctatgccttgctgcccagacataagctcatgcaggctgggactatgtcttgcctctctgctgagccagcaaagggcaaatagcagcctcaagactagcaccctgtgttcacgatccttgggcattttagagcttttctgaatcacttaatttacttaatcactggccaggcacggtggctcacacctgtaatcctagcactttaggaggctgaggtgggtggatcatccgaggtcaggagtttgagaccagcctggccaacaggacgaaaccccgtctctactaaaaatacaaaaattagctgggcgtcgtggtgtgcgcacctgtagtcccagctactcaggaggctgaggcacgagaatggcttgaacccgggaagcagaggttgcagtgagccaagattgcaccactgcactccagtctgggcaacagagcgagactctgtgagaaaaaaaaagaaagaaagaaagaaagaaagaaatatttaaccactaacttctctctgcatctcaggacctcagcaacacctaaccttctatgagtcacagaaaaactaagaatctgatgatcttttagtttcttgttgcaaaaaaagaaaaaaaaagcccattcatagaagatagcatcatagtatcagtttaaaaaaatccctgaatctctctttccttagaacgatctccaggaaatgtgatctctttctgttctaacattttgggattccacagcatttcctcatttcctttcgtgttccatctctgtcctgtcttacctctcagggagaatcagctaattctttttctccttgatgttcttagtataaggactatctagcctttggtgtcagaaagcccttgagttgcttatcaaatatgtgacttgacaaggtacttgaattctttaagcctcagtatctatgtcaggaaaatgaggataatactaagatctacatcatagaatgaatctgaaggattcaatggtatttggcccccctcctcccctcctcctctctgactgcccctccctacttccaaaggccccctttctgtttggaggctgacttggtgttggcacagttccaggtctaagcaccatgagcagccccactgtgaatggatggacaagaggtccaagctggccttaggccagacgttcatctcttctcatgctgccacattaagccattcaggaaacattagctcccaggttgagatgtttccccacaggtctaatgatttcccatcttctctcatcagatgtgtccctatttacacagcccccaggtacagagcccactgggcacttttctccatgggatactccctcaaagtgaatccctacctctcagcagcatgctcctctcacacatactgtatttaggtctcatgttttcctacctccaagctgtactcgtgattatgaaatgcttgattgtggtgcctgtcgaaatgcattcataatgcaactttaagtctcacagaaaattttcaggggaaattaaagccttgggaagaccagcaccctgtgtttatgattcttgggcattttagagcttttctgaaggttttctttatccttgcactcagaacagggaaggaagagacatgtagatgtggcatggagtgctgggggatgaggatgggggagtcggaacctcttggttctggccctgccactccccagctgagactgtgtgagcagcagcaagtctaatgacagctcaggtttttagctgtcttcttccttctgcatgctcaggactcaccgcctgtctgatgtctgctcctcagcctcctagatggtcctccccttgagtgttttgtcttgtgtcttcatctctttgcttcctactccctgggttagcacctccactcccacagctacaaatgccacccctctgagcatggttcctcagtctctatctgtagctaaaatctccaacttcttccatctgaatctcgactttacctggatacctggcagggacttcaaaatcaacatgcccagaactgaactcacactgcatcccactccttccaggtcacccatcttggtgactagccctgttctctcctcaggcacaatagtccagatatctcagaagtgcccagtgagccccctccatgagatgcacttgaagccagcccattaccccccaaggctgccaccccctacatgggaggcccttcttaccttgtgcttgcacctcttactaatgatgaggcctgggctgactaacatggctctccctgcttttgtaaaatgagaagctttagagaagatgatctcagaagacccttctgaccctatctgtctttatttcagttatcatccatcgaactctgtggctcaaaaccttgcaatagtcttgaccctggattgtccaaaccaccctcccaactttgcaagactggagaaaatcctgtgatgttctccatgactgactcctgctgccttccttgctggcctccacaccaccctcatgctttcagtttcagtgtgcaaggtgcatgcacctcaacactcagcaggtcctcacgttcacctgctgcctctcaggctccatcctgtgcagtttctcttcggctgttagagtttctctccctctttcccttcctggccttctctcatgccccttaccttctctttcccatggtctgttgggtgaaccctccctcattcttcaaggttcagatcaagcctcactcttcacaatacccgaccccagagctaatatctgtagcactgtttcagtagagatgcaccaataacatttacccatctgcctctccactggattctgagctccttaagcgtcctgactttgcattcccagagcccagcacaatacttgcacaaaattcaggttcaataattgtattgtgattgaatggctccctaaatctataatattcaatctcattaatttggcatttttaagactctttccattccagatccaccaaactgttagctgtttcccttaaagtgcattttacttagacattcacccttccataatcatgcactgaacatgcccattgccgtggtgggaacttttgaccctcgacctctacctgtctcatgcccataagtctctatctattcttttttgtttgtttttgagacagggtcttgctctgtcacccaggctggagtgcagtggtgcaatcactgctcactgcacccttgatctgggttcaagcaattcttccacctcagcctcctgagtagctgaaactacaggtatatgccactgcacctggctaatatatatatttttaattttgtagaaacagggtttcactatgttgccaggactggtctcaaactcctgggctcaagtgatcctcctacctcagactcccaaattttggaattacaagcgtgagccaccatgcctaaccttaccttatttattctttaaggcccagccaaatgtcactttttcctcttcctattctggatccaggagtgacctcttcttcctaggagtcccataggtcttggaaccatttttatgatcctcagttctttgggtgttataatagagtgattcagtcaattaattcatctttaaatacatgttcttcagggctgctctgaccaagcacagggtctccatcaaggctatacttgccatgtgtatcttagagtattagcccattctcttgctgtgaataaagacatacctaagactgggtaatttataaaggaaataggtttaatggactcacagttccacatggctggggaggcctcacattcatgttggaaggcaaaagaggagcaaaggcatgtcttacatggtgcgggcaagagggcatatgcaggggaactcatctttataaaaccttcagatttggtgagacttattcactatcatgagaacatcatggaaaagacctgcctccatgattcaattacctcccactgagtctgtcccacaacatgtgggaattatcacaattcaagatgacatttggctggggacacagagccaaaccatatcacatgagtctcctcaagatctctaccaatggtggttcatgacggtctttaaatccactcatcctcatgctctccatccccactatgagccccctggaggagatccctcatctctcacctggaccagagcaatagcttcctaactggtcttctcacctccactgcagccagcatgaaatataactatgcaaatgtgaccaagctatcccccacataagatccttcagtgacttcccactgctcttgggatagaggcctaaaccctcagccaggtctattccaccagctctccctgcagccctacccccatggcttcctgcttgctctctgctttccagcagtgtggtccttctatgtgctctgggttccttcccactccagcctgggcccaggctcttcctctactgggaacattctttcttcagctttcccagggatctgatgggcccctactcatccttccagtctcaactcaacatcacttttgctcctggtttccactcctatggcagctcccctgtttatatgctcagcatttatcccagtttgtcagcctcctaggatgattacttgaaggcagagctcgtgtccttttatttaccattgccctctcccctctgcctctgtccccacacatgtgcacctatttccatgtccagcagagagcaggcacccagtacacatctgctgaatgcgtgctgacattcatgggctgcccttaacagactgggagcagcctgtgggcaggagatgcagcttattaatcttggttggaaacagcaagttgtgttgtgtccatgtgtgtaagtgtgggtatgtgtatattcggagtgctaattggtgccagataaaacaaaaagcaatgtggatcacctgagatcaggagtttgagaccagcctggctaacatggtgaaaccccaactctactaaagttataaaaattagctgggtgtggtggcatgtgcttgtagtcccaactactcgggaagctgaggcaggacaatcacttgaacccaggaaaggcagaggttgcagtgagccaagattgtgccactgcactccagcgtggacaacacaagactccgtttcaaaaaagaaaaagcaatgaagcccatgtacaggaatgtgagaatgtgagaaacagattcagagaagcagtctgggggtcaaagcccatctgagcaaaaaacagtaaagcagtgcctaggtttccattgcatagtgtcctgagaaattttctggagcaggatttggcatgggggtgtttagatgggggcgggggctttaaagacccaggctccttcctcccttttgaatttcttaaatgcacagcttttaagattgtaaattatttgattgtaaggagcatattttatctatcttggtttcctctgttcccataacaacccttgataaatagtagaagtttcataaatgtttgctgaattggattgactttatcctaatcatagcctgagccctggtaagatctgtttattcattcaacatttactgtttatctactattcattcattctttcaacattttttgcatacctactaattgctaggcaatggggctacagctgtgaacgaggcaaagtttcttgtttgctcagagcttaaagtgtaaggggaattgagacagtataatcagtactgaagtaggaatgatcaggggaaaagggatcccagagaagggtaaacgaacctagacctggagctaggggtagtggtcagggaaggcttcctggaggaagtgacttccaagatgaggcctgacaaatgagtaggagacaacccagagtaggggataagcgtgaagagtatttaagtcagagaaacagcatgtgtaaaagttagagaactccacatcattcactgattcaccaaggcaggtgtgaaggataggggtagggtagcagtgagtgatgaggctggcccctgagtgacacctggcctgattatagaaagtgctgggccaggtactttaattaattcttttctattaaggcttcaggacaaccctataaggcatggatcatcattccattttattcagatagaactcaagaaaattcaggggctcaaggaagttctcccagttggttagcagtggggccaggcttcagatctatgtcccagggctttcccacccctgaaccacctccagattctgaggctatgcaagaggaaaggcattcatgctgggcggacattggaccagaaacacaagcacacccctccctgatgatgtgggtgcaatctgcattcctaggctcactggctggtctccaccataattactatcttctgtgtgccacctggatggagcaggaaggggaactagaaaggccaccactacagacagcacttttaacacggagcgtgttaacctcttgtcttaatagtattcaaatgaggcccccaacccagtgcactcagggccaacacctggctgcacaatttggatggagcgcctcagtcccgaggagcatgaagatctcattatgtaattaggtctttggaaaatgagctattattctttggctctgcaatcacgggcttgatgcagcttagggatccaaggggatgctgggggtgtgtgtctgttgctcactgctgctgctgcatgaagactgttacagagcaagacatctccagaacgtcccaacctctgggaggaaggaagcgggacttctttcctcatcttccaacagggaacagcttagggattagggaccgtctagatcggtggttctcaaacttctttgagcatcagaatcccctggaggtagagcccagcaacctatgctttaacagttcctccagggagtttacttcagaagattgtaattatggtagagaccagccagtgatctggggaccgcacgttgagaacggggccctctggagtaaactgaggcaccacctaatccccagcttcctcaggaagtccctccaagtcctcaccatcagatctgaactcctcattgttcacatatgcacagggggtacagttgagcttcaaagtttagcgagggagagaagaaggacaggtgttattcctatttttcatatcaggaagctgaagcccaggttccaatgacttagaattggtagaactggtaatagaatctaagtcttctgttagccattgcaacaactggccagacttaaatttgctccagtagatcttaggcagttagttatttccttgagctcagggcagttgggaccactatctaggcacccaaatctatatgcttatcttctccctgggcacccagctagaccacctttcctgccttctttctagtcgggtaaggacgtgttaccaatctctctcctttggaatgcagtgggagtgatgagttcttccaggcctggtccatataaatctcccacatgtattactcctgatgctcgatggaatgtcaaattccagggtgactttggaagttgtgagaacctggagccctgagtatgtatgtggaggagagtcatctgtgagtggaacaactatctagaactttatataataaacttccattatgctaagcctcctaaattccggggtctatttgctatgatggcctaacctgctctaattaatatggttagtttcttaaagtatgatctcaggatgacttgcatcagagtcacttgctttcttaaaagtgagatgcccaggcttcatcccatccctactgaaatggagtccttggctgcagaatctggcaaagctgtattttaacaagtatcccaggtagttgttatgcacactgaagtttgacaatcatatattctggatctgggggttggcacactatagcccacagccaaatgtggctcgccacctgtttttgtacagtctgtgagctaagaatggattttggttcaacaaaaaaatcaaaaggataattgtattttctaacgtgtgaagagtgttattggactacagccatgttcatttgtttgtatatatttttggctgccttttcactccaacggcagaagaatagttgagtcagagacgatatggtctgcggagtctaaaatatttactatctgccccttcacagaaaaactttgctgaccaatgttctagatcctaaaattttactttgtaaaatgcctcctgatggatagtaatgtgtagcaatgacatcatgacctatggatttagagtcccttgtgacatggacatgagagaacaaatattatcattcattcattcacgtattcatttttgtagtggacatttattggatgctctcaaagtgctgggcattgagttgcaaaagggaacatgatgagtgcacaatacataagcttggcaattatgctttttccatgacaatgaaactcattattaaataagagactaaacaatcactaatctctaattactgtataagaatgtcacatgttatttcacagggacttttgtagaaggtgttaacagaaaggttcatgctaggagacaactgctcctattgaagatccttcattttatagtaatggaaaatagtaaaggctgaactcaaagcaattgcagagagttagggacctctttgtattttcttccttttaacacggaatgatgtgaaccagtagaagaggtaaaaatttcccaaaagacaacacctcccttaaagctaggtatagctagtcatctacaaatttctagccaaaagaaacaagataaatcatgtggagaacttttagaaaggttccttaaatagcgtggacttaagaaggtggggagcctctttgccccccctttctcttccagcaacaatggaagagaaagaaggttcggaactccctgagatgacagttgggagagagatgatctagatatacttgaacatcatggccttggccacctagcaagctctaggcaggtggaacaggtgagccagccagagcaagttgaaaagatgctaatgggaaggccaaagagacatagctaactcccacatgatccaaacacaaattaatctctgagaatttggttctaaggttgaaatgtaggtaaggtgcaagaggtttctaggtagcactgattctcagtattgggtatggtctagcttttaggtcaaggaggtatatccaagtcaatgaaatgaattcctgaagaaggattcgatcttagaagaaagagtcaattgaacatgaatccatggtatgaggccaccactacctacttggtcaggggttcatggccaagctccagttctggtagaagcagctaaaagtcaatagcagaaccagagcaaaaaatcagacaagcagtgaggccaagtagcaatgctcagggctcaagaggtacctagaacttaattatcatccatgcaccaaaaacttctcccctaaagctaaatatagctagccatctaaaagctctagccaaaagaaataagagaaatcatttggggaacttgtagcaaagttccttaaagggcactaacttaagaaagtagggcacctttttgccttcccttcctgttgcctcccagaatacagatgtgatgggtgatgctccagcaggcatctggggctatgaagtgactttgagaaaggaagtacatgctgggatggtgggactgaattccatgggagcctgcatctctgttaagcctgaagcagccatgaagcagtctttggtttgcttgtctccagacttcttttatattctataaaaataactttttatcttatttaagccagttatttggggttttctgttacataaagctgaacttactcctacccaatacaccccctatccaggagcatttcctagtatggagtacatgtgtcactgatagtagacaagccatctttagatagcattaactcagatgagcatggatctatgattatgtatttattttaatatatactagagaaaatatagccagcacttcaaacttgtgatttcatggataaggctcatgctggtatttacatttaaaaagaaagtcaatttaaaataaatggttgaataaataatagaacaaccagcttgcaagaacggcaactgtagtgaaggtagaatttgaatgactgaatgtttgcaagcagtgccatagggaatgatggtgaaactggacctgccttgttgggagacccagtgcttaccttgcctacagcaggggctcagtaaatgtctgtggaatgaatgacaacgtacacaactttctccctgaatgggctccagcttctctctgaatacccttgcctctgcctgtagcccacctcctccctgcctctggataaaagatcctaagctctttctttgtgtatttttctaatcttctaatatgcaattgttgttttcaaagcacaagtcagttacctgctcttggggcttttacttttcaggttttcttaaacggaacttttagccttggccatttcacaattctttgtttatttctttctcacactggctcattggttgggccccatttcatgtggttgaaataaaaacagaaactgcctcccatatagaagatctatggctacttgtttctctagagtattaatatatttttcacttgtggccacatggagccctaactagaacctgtctcctagggatgggaggaaagaggaattcccttgcttttaaccagctcagctacagcagggacctcccactgcagaacctcccttaatctcagcattgttccaaaacccatcagaagaacagtgagcctgccctgggtttgcagaccactttacagagcttggagtgctttcagatctctaatctgagtttctgcctgtacaaggagacctggaacccttgttggtcttcagtcctttgggctcactcgctattgcaaaaatctggaaaaggctgggaggagcatgtagataaggaggacccaaccttgaatggaggataaatgaaatgtctaaggaggaataatgatgtgctgtgttcccattaagatgaaccatgacattatgggaactgggctcagggaacaaaggggaagcccacttgggaattcatgtgggatggtggagagaaagagaaatggtataaaggatgcccaaatgtcttggagagcattgagaaccaactgaggcagagtgacgagaagtggcttctgcaatgtggacctgatggtgagaggtggagctgtggctaggagagtaataaccaaatagccttatgcacctgcaacctctggttagctccattggtacacagaagtaggaaatattaacaagaaccaacttctggaagtctggtttttaaatgttggtatctgtcagtatgatctgtgttggtggtaactgccctacctgttgtaataatacccagcatcctatctaagctttatgataacagtcaagaaagcagggccaggatgatatccccattttatagtaaaaagactgaggtttagagagtcttaccgaaggtcatactgatgatgggtagcagaatttagtctagatgccaggactccagtttcctttccatcaccccagtgactctgcactttgtgattcacaaagtaagacatatggaacagttcttgcccttgctaatgtaacaatatccttttccttgtaactactgccacttcagccttcctctgtgtatctggcatctccagtgggtctatatctacttgattcttctctcctccttgaccttcgcttggttttatggtctctccaatgacttctttatttctcttttttctcttccagacgaatttaattaagagaaaaatttagaggttggcactagtttctgctgtgtgttatacctcgggtagaactagttgggagtggtggacactcaacttttcttccatcctttcctcctacatagattggctgggtgccatgctctgtgtgggaagcaagaggaaacaggaacaactaggggaaaccttacttgggctctagacctcttggagaatctgatgaacaatttagcctctctcccttaaaatgtacttgtccccatttgaccaaggtttttgcttgaaattatagggttcttgaatgccttgaagcctacctgtaaatgccagagacgtgtggctaagaaggggtggagggtggtgcagctcttgatgggcaaatagctggtgacactgtaatacagtcagtgcagagaggaagacaagtaaagagctagaggagtgcctgggtactgccagtctgaaaccaggaaggtcaggtctgcagagtaagctctggatgatgttggggaacacagtgtggggcagaggccaggagtttaaactggatcaaagcagagatcttgcaggtaagagggcatttaactggggagtgtcagtgcctccctcttgaaacggtggtgacaacatctttctcacaggattcttggaactgtgaaaagataatggataggagagcccttactcctgcattgtctccactgacccttgtgcctctccagggcagggaccttgtgttttcacaaaatccctaagatctagaacagtgcctgacatgaaagagacgctcttcaaatgtatatgtattacaatcaccagagcaggcattgtttgagcatctactgaataagcaaatgaatggagggaggcagacatggagaaaatggtttgattctatcccaagggggtgacatatcagctttggaattgcccatcttacacaaataaatgttgtcctaaaactatatgtgtgtaaattgaagtctgataagaaaaatcctcttaatgactttgataataatttcagagaatctttgcttctatttcctcttgatttaaaattggcagttgcctaatatatgggccccaacagcacttttttctataaaggaagaaatgcccagaaagtcaactcttaagtgtaccaataatgaggggggaagaaaagaggtcactagtaaacttttacatttcaaaagactgccattttccaagcagaaactcttcaaatgtctcaattgactcacccacagaaccaggggcagggggaagagcagaagacagcctgcacccagcctctcagaattaaattattagctccattttacactttagaaaagcatggcttagaaaggttaagtgacctgcaaaagcaagttcaaggtggaataagaggcagtgacttttccgttggttgctgcaaatgaatgttagagaaaaactgagattttataaaactgaggtgactcataatgtagaaaatcctcctctctgctcccacctctttccaagctttgttcatgaggcagtgtttgcacaggaaggacaacaacagctggacacacctgggtcagaaacctagccctgcgttccgagctgcatggcctctgccactgaacaccagtgcgcatgtccatttaccacccaccctgctctgtctggtccccattcacaggtcagttgggcccagctctgggggatgagtgttgggaaatgaggagaatccagagaaaagttgccacggcaacaggggagcagtggtggctactctctaaggtgatctatggctccacacacgtcagaaggtttgcttgtttgctttccatctggaccctccaagcttccgggcacattgggggaatattaatggcactccctccctcctctcaccctttcctggggcagccacctgggctttgggtaccacctgcagccagcctcccggagacagtctggaaagctgctttggttgctagtcttctttcctcactgcataatggacacatcatgtctcagagctggaagtgatcacagagatctttctggcccaatgctcttgtttgatgtgtggggaaactgaggctcagggaggtacagtgacgtgttcaaagacaccctgtgaataaggagaagggtcacaagtggaactcatagtctagggctctttctgcagcaccttcttgcttctctggggctaggaagaaaggctacttagaggcaagttaccataaccaactgactttggccaagacacatcccttccctgggccacagtttctcattctgatcaataagaattggaatttgtggttgatgattctctgcactgttaatagaaatgacataacctttttgaagactcaaaaaatgggtcaaaatgggacttacaaaccaacttctgactccactaatttttcttggtgtctgacatggtttagctctgcatccccaaccaaatctcatgttgaattataatccccagtgttagggaagggacctggtgagaggtgattggatcctgggggtggattcccccttgctgttctcgtgatagtgagtgagttctcatgagatctggttgtttaaaagtgtgcagcacttcccccttctctctctccttctggccttgtgaagatgtgcttgcttcctctctgccttccaccatgatcgtgagtttcctgaggcctccccagccatgcttccagtacagcctgtggaaccatgagctgattaaacctcttttctttataaattacccagtctcaggtagttctttatagcaacgtgagaatggactaatataatgtctttacagaagtcacgtcagtttccaggagctaaccaatagcttagccatgaattccccttcgttactgtgtctgagtactgcacagccctcctaataagtttccctgcttccagtccaactccgcagtcaagtatctaggttgatcatcctgaaacccacatctggccaggccatcctccttttcttgcttaaaacccagtcatgggccttcagggtcaatatcaagctctttagcacggatatgaggcctttcctgaacacagcattatgccagagtcctttatcattacccctctgcttcggtgtgaccacaatgtttcctaaacatgcttggatgtctccaacttcatacatacagaaccctctgcctttgtccacctcaccccctttttgctccacttgtcctaactccaattcgctcttcaagatccagcttggctatttccctgacactctgaagtgttcctctgtgctccctcggcacctggtacttatccctgttaaagctcttctcatgctgcataagtattgtatttgttatctgcctctttcatgagaatgcaagctcctagggtagtaactgggtcttgttttttttttgattccctagtgtttcctgtagagtctgacatgtaggaggtacttaggttatacttgctgaatggctggataaatctcactttagaagattcgttcattatcaagttatagggagttgtctaaaattaattccaagtttaagtcgtgagtacctgttacacactgtgtttgtcagcctatcaattccttttaccacaagaggtcatccataaaatgttccttggcttgagtgtcagaagacccttaaacaagtctttattcctggggatgtcacttcttcttcctggccattagctatataacaacaggttgggcctgatgacttaaaaaaaaaaccttactttatcccctttttatttcatttcccataattccaagatatccaatcagcagtcaacagatagcaagtgtagtagctgaggtcagaataggaagaaaaaagtctatttatttaaagtttaattatagctgaatttggggaacatggacattggcaaggtaggacttgcctagaggggccccaaataactgtccagttgagcaggaaggagtagacagataccacagatacagttcaggttggtaagctaaggcaggttggaatagccagatggtgcctggggtcaggatcagtgcctggggtcagcatcagtgactaggttggcaaggctgctctaagaacagaggctgtttgcttctggctgatgaccctcccatgatgctatgagtggggacaaaaggccagcagtggagccctgctcttgactggcacaaggtcaaattcatcatcattgattcttagagatgatcttagtaactgtcaattcactgactttatctgaataaaatctgaagttttaagctagttttatggttgtataattctggagaaagaccaaactcttggggacagcattcaaagttcttcactgtctttctctccggtctcatctccttcctcttatactctcttcctcccactctctctagatgctctcagctctttgaaggcactctactttcccatgccttgccttggtacctgcacatgcactgccttcctcttctctcgtcatattctcctggacagctcctactcatgactcaaaactcagctcagctgtcaccttctccagggagccttctttgacatcttctccctcaaatctagatcaaggatcctttcttatcctcccatggcttgcagcgttctctcttataaccctcactaaactatttgtttatttaattgctttcccactaagaacatgagttccttgaggacagagattcttattgctgtatctacagggcatagcagagtgaaatagtcaatgattttttgagtgaataactgtattataatttttttaaaaaaggaactataaccatctaagtccatcttataaccatctaagttatagttttctatcagtattggacaaaactgaaattgggctttaagtctttgagaactttgtacaccctgttaataaatactaagaagaaatgtttgcaatgagcatacactttgttaggtggcaaatagtttcactttcagtgtttcgtggactaagcattccctttgcttataaaactttgcaaaaattatgcatgttctgcgtgctaggtgctagaattcagccagacaaagggtgtgtaccaggccctgctgaattagcatctttgtatggtaatgaagcgtgaagagtggccttttgctgtttctttgtgactctgttccttcctgctggtgcttccagtggcatttccttcagggaattctattaggaagtagattcttcaggagatggattgagctgggagggagccagaggctcagaggtgagtgtatagggcaggcctagaagaggcacagagagtgaagttgtgtaacatacaaagtactaaactccacgaactcccttaaggaactctggtgtagggaagacaattgctcaagtgctggtggcactaaccctctggcgtttcacctctcccttgaagtactcctaatttgatctttccactgcttctctctgtaaaagaatctcactaaagaaagatacaaaatgctccacagctaagacaagctccccagagaaagttgccaagggaggggcaactgcacctttgctgcccagagtctgcctccccatgggggcttactctgatacctgcctcccttcatgcctgctgtcaggggtactcactctttttttgtttctaattctgttgtgagcaaaatcagagccttcctttggttcttctcagcatcattaacaggcttgcttttcagaaagatctttagtaaaaactcagggcaattgataaagataagactgccaccattgttaacaaggaccacaaaacaaaacaataacctagctgagatagaagagtgcagagctcttgtccattataacgaggcccctggaacttgctttatttttctctaaaggaatatgccaagcaccttctttgttcgagcttaggtattctcttctgaagtctactttctttcaagaagaggcccagtatttatacctttatacttccacacaaactgaccactgtagcatgagacagtaccacagagagaagttggacaagatggtagactatattttccaaaatggactcatggatatgtatcccattccacaagttcttacagtgtggcatgacacctctccattaagaagttaaatctatgctctctcttcttgaacccagtggaccattgtaacagctttgatcaatgggatacagtggaagggtactgtatgacttctgagtctaggtcataaaaagtgaaatggtttccacctggtgtcagcatgcaccttgggagctgacatgtaagaagtctggctaccctaaagctgccatgttggagaggtgggatagagaggccacatggagacagaaagagatgtccatggagtttgttgttggagttttcccagccttaaccaccaatgggtgaaacttcagataattctagccccaagccctggaggtttctagctgagggcccagacttcagggatcagagaacagacttccctgtggagtcttatttgaattcctgacccaaagagggcatgagtttaatagatggttgtcttacaccactggattttggggaaatttcttatgcagcattagataatcaaaacaaacaaggagagcattttcccaacgttagcactgagttgcgtgacttaacctccaccactttctactttccatgttaccactgacccctggcacttttcccctcttgatttctcccccatttaaggcttcatcttgcccctttatttggactttgcttctttggccaccatctttcctctctcctcaccaatgatggaggttctgctgcttctgctggctttctttctctgccctcctttcacccgtcttagctcaggatcctctcccatgccacaaactttccacagggaggccctggagagggacatgggtaccaggtgctggatggctggggaaggcaatgtccttgttgggaacctcacttctcaggtggcatttactcagatataaaccctccagacacaagtctgccaccttcctgttcttgaagatggagaaagcaagatggagtgaacatgataaaggccctctgcttccctatgaagattatccttggtggtgaataaaacaatgggagcaaatgcaaaaagatcccagaaaactaaaatatcaaagggcagtgagtgttccaaccaaagatctcaaattgctgataggatttccaggagggtcaccaagaacctgccatagaccccacttccctaagaatagcagactctgacacatggagagccagtaagagttaaaagcagagtatttctctagtacctgaatccactttgagaatgagctggctgccttgagaaggtgatttgtgagcctgagtcacctaattggaacaagcccagaggtagcaattagacaatgtcaagtccttgctcttctcttacttgttgtgtgactgctgacaagtcactttacttttttgaggcttcctttccctttttgtaaatgggaataattccagcctgccttgcctccttccaggactgccatgaggataacatagcatgatgcacaggaagacactttaattgaaagcatagcacatgccatgctgggtactgggcactctactgatgtcatgtcacttattctttgtaacaatcctgcaaggtaggaatgattaccccatgttacagaggaggaaacaaaggggcagtgggactatataactccccaagagcacatggctagtaagaggcagagctggcattccaactcagatttttccggtgctgaagccaatattctttccattagagcatgattactattagtgctgttgttgttattgagttatgcctcttctgtgatccatttcgagagcatattcttagtataaggaacacaatgaggtatttgggtctcatggaagggtacctgcttgcccccaaattctctcacttttaaccccataagccatactccaactaaattaatcagatttctgcagcattgtctcccaaagaggtctggattcctaagactgaggtcctcggggcatgcagggccagagatgatgcaaccaatgatgtggctgagaagatgactatttccagtgcctgctgatggcataagggagaccaggcagcattccccaggacagccaccttagggacaggctgatgggaggctcagtttctgcaacctacagggagcaaaaatctgagcccgcaatgcaggcaaatctagcctggacaagctacctgaattggaatgagcaggagaatttcagcatgttctcctcacaatgctccctaaatgacttttctgatcaaagaacaccacccccaaccccaacaaatgggcaacctcgcagtactgggaaaatgagcagctgggcatgcagaccatgctctgctttccaacaaattagcctagaacatgtgtattctgcctatggagaatcaacataaggggaaatgtaaatgcaagtgcaaggccttcattaaagacagctctcctgcaagcaaaggctggaggggaggggtctggttctttagcagtcaaaaccaaagcaaggtctgttactcaaagaccctggccgtctctggaagcagggtggagggaggggtgaggaattccacacctcccagctggaggaaagctcagaatgtaccatgcaaattctttgattagcattgggaaatcatctccagaaactagttgattcccactgggattctctctagcacagcagggtacagtaggaaagcaggatttggaaaagactcccagtcatgccatttatgagcctgccacttgggcaagttcctggctctgagcatgtacacgtgttaccggaaaggggtcccgatccagaccccaagttcttggatctcacacaagaaagaattccaggcaagtccgcagtgcaaagcgaaagcaagtttattaagaaaataaagtggtgaaagaatagctactccatagacagcgtagggtgttcaggaaagtaagaggaggaacacgcccactctaggtataatgcttctttatatacaggataacaaaaaagtcatggggagatgtgctttgctatatcacaagggtttgtgataaaagattagttttctttattactatattttgcaagaattgatattattgtctttaaagcaaaattaagaatgcttctgttctcaagatagtgggatatcaggatattcctgagtctgggtctgtttagtaaatgttatgaatctgtccccttaactgtaaacatctagaggctaggaatagctaacttgctgggaatgtagcccagcaagtcccagcctcatttttcctagccctcactcaagatggagtcgctctggttcaaatgcctctgacacatgtatgtgcttgtgtgagccaaaagaaagcattgctgaaagcaagaggctcacagggagaggtcacacaacacatggcccaggaagccactgaaaaactacaacaaaaaataattgagctctttgaggcctgatgggaatcttactaaaaccttcctttcctccttgaggcttgattttcacatcttgactctgccactgactcatctgtgtgacgtagtcttattcactttcccttcacctgtgggatggacatactggtgctcatcagggccagcagaggaattcaaacgatgtgacatgtctgaaaacactcgcaaactataaatatactttgggatttttttttttaacagggagagggtgaaaataaaagagaaaagcaaatttcaaagcagtgtgtgcttcctctttgtgtgaatgaggtctactgggactctaatccttagagattgttctttagggctctgagaagattggctccagagcctttaaaatgatttggaaattgaaaagagaaagttaaagccatgtatgaatttgtttgtgcagggcataggagcagacggtgaggacaggggtatgtagaagatcaccacgtcatcccaggtggaggtgagctggggaggcagtgagggtggtcacaatactgagtgtgaaggctctagccccagaggaattcagataggaataacacttaagaagaactcccccagaccctctctgcctctcctgaagctggagctgcactagatgaaatggcataggggctgagccagctcaaatacttcctgctgcgagtgtccatgtttttaagaactgtagcagggctgggctctcagggggatcagggtgtgggaagtggcaatcagaaggcatacagatgttaaggaggagtgataggtagctggtgttagcacagaagtacagtggggcttctggctctgctggcagtgaaaaagcaagatcagaaggtgctacattgtccttgagtgatctcctttgtgggtggcctgtgtttcctcacctaggacataggatcaaagctctgcctaccccctggggcccgggggaatgagacaaagcagcaggtaagaaagggtttaggggcatgaagccaactgaatgggtgaggggctggtggccaccatctgcaggtgaccttctggaactaccgcccttcccagcatcttctccctacttggctgctgggacctcatttggacctcaccttggtctccacatggaccctctgggctctgtaatgttactctcccacctcccacactctggcctctcatgctctcttcctgagtccccagccacattcccaccccattggaaccgctggccattgggatctgggcagcccatagccccctgggaggtaacagctcccagtggtgaaacagctgtgatggggcttccacgcattgtctgcacctcagggtgggaggtccgtcttggctgagggtagatgcccctcatcgtggtctcagcagtggaaggacaggcttggccaggcccaggaggcaggaggggatctgttgcctgttacaggagagttctcttttctctctctgcacttttctctgacctcacatctaatttgggttagggcgtgggaacacctccatcagtgatgcccctggggttctgatgctttgggcaagggtggggacttaggataagcagaaagggaatggctttgaagctttcaaggcagagctaaggaatactgtgagtaaatctgttccatgccaagaagagaacccaggaggaaggataatatgtccctggatcctatggcacttatttgaaatgggttccatagagcatgtaatcgacctggtcagaaatgcagaggaataatatttcagatgctaggtggggacagggtgttctgaaaccacctttgcaaaattatgacagtaagagaaatctgacatagttgattccatcttgcttctgacctctaagctgtccttggtcattcctgggcataggcccattcctgggcaaaggccaagctaactttcaaaggaatttagtttatagtttaacttatagttaaacaaggatgataatagctgcttcctaacagtattcccctccctgtttgagggctgtaactgcctttgtgaaaactaatgagggaccacaagattaggattctgagagaggcctgaactctgctagacgtagatgcagtttctataatcccttattgctcaggagtcatgtggctagaggtcacaagatttgtgacttccccaattgctcctgtagataacatcactattataaaacctaagattggtcttttttttctcttttctcagatggagtcttgctctgttgcccaggctggagtacagtggcgtgatcttggctcactgcaatctccgcctcctgggttcaagcgatattccctgcttcagcttcccgagtagctgggattacagaggcccaccaccatgctggctaatttttgtatttttagtagagatggggttttgccatgttggccagactgctctagacctcctgacctcaggtgatctgcccatcttggcctccaaaagtgctgggattacaggcatgaaccactgcgccctgctgttctttattttttatttatttatttacttattttgagatggagtttcactcttgcggcccaggctgcagcacagtagcatgatcttggctcgctgcaaccaccacctcctgggctcaagtgattcacctgcctcagtttcttgagtagttgggattacaggtgcgcaccacccaaccaagctaatttttgtatttttagtagagacagggtttcaccatgttagccaggctggtcttgaactcctgacctcaggtgatcccgcctgcctccacctctcaaagtgctgggattacaggtgtgagccaccgcacccgacccaattggccttttgatttttagacttgcattttggcaactgtctgacctcatctagaccggtgactcatgactcaatgggtcccgtggcacccccaagaggtggactcagtgcacgaggatggttttccacacccctatgatttcatccacaaccaaccagcagcacctatttcccagcccctctgcccaccaaattatccgtaaaaaccctaagctctgagcttttggggagactaatttgagtaataactccctgtcctacatggttggcgttatgtcaattaaactctttctttactgcaatgctgtggtctcagtgaattgattttgtctgtgcagtggcaggaagaacccaacaggtaattacagttctctcagcatagtagtagacagagaaagtgtgagcgtgaggttatgcagcccagaccaggagtccagggaacagggttcttgcctcaatgtttccacttggcacccacaggaccctgagcctatttttcactgatgagggaggagtgtctgaatggttaagtaccttctatatgcttgacaaagcactaagcacctttgtagagagatgatctcgtttactttgaaccacagccatgagagttatggagaataacctctattttaccgacaaggaaacagaagcccagggaggttgggaccgtcagagattctgcttcactaggtctctactgagcccaagaatctattttttaaagaaatctgagtttttaaaatgctccttaggtaatcctgagccagaattattaattaattatttattcattacatagtaaatacatagtatgtcagaggatgataagtgttacatagaaaattaggcaggttaggcaggcagagagccctgtggtgggggtgtttgctctcttatcaaggtttgtcagataaggccccactgatgaggtgacatttgagcagagacctgaaagaaacaaggaagtgagccatgtggctctctgaaggaagaatctcccggcagaggaaacagcacatgacgggctctcaggcaggccgtgcctagcatgttcaagaagagtagagaggcagtgtggtgggggcagagagcgagggggagagtggcaggagaagaggtcagggaggtgcagggacaggctatgaagattcttgcaggcctttgtaaagactttaattttgattatgaagtttacggcacactattaaaaggcagtgagcagatacgtgccagggtatggcttgcgttttaaaaggatagttctggctgctgtgtggactgactacaggggctgacagtggactgactaccgggactgcaagggaagaagcagacagaccagtttggaggctccaaagtcatccaagggaaggtcacagtggcctgaaccctggtggatgcaggggaggtggtgagaagtagtcaaagtctggaaatatttctgagggtagagctatttgctaatggaggtagcaatgcaaggtatcgaaaaggacaggagccaaagatgaattccaagtgttgtcctgagtaactgaaagtgctcaggaaacctgttgcctgaaagtaagtgagtagcagctaactaaggtggggaagaaggaaggacatgttggttttgggggtggagataagaactcaagttatcgacacaatgagtttaatatgtctgttagacatctgaatggagacgttgaataggcagttaagtttatgagtgtggagcttgggcgatgtgtggactaaatatataaactagggaattgttagtatatgtttggtatttaaaaccaatagactggaagacataccctaaggattaaaaaaagatgtctgtgccttgggacactccagtatttagaggctggagagataaggagaatcaatatgattgagaaggagtggccagtgagtaaaaagacagtcaaaaaagaatacaaatacaataaagagtcaggaaagaaaaatacagctgggtgagaaatgagctaatggggtgctcctttgaatcacattttttccccatcaaattgtgtaagtcatccccaaattgtccatttctttttttttattatactttaagttttagggtacatgtgcacaacatgcaggtttgttacatatgtatacatgtgccatgtaaattgtccatttcaagctgcttttcaaagtgcatggaataatcaatcttatcttaaacttattgagaactaattctgtgctgggcattctttaggtgttttatgcatatcaacacattcaatccatcgcaattctgagaagcaggcactgttactacccctgaattaaaagcaaggaaattggcaaaaagagaagctaaactactgcgaaagttcacacagctccagaatccatgatcttgaccatttcactacccttcctctataagcagaattctttaaccaacttatctgagcaattatccttctcctcctgctcctctgccattgctgccacttcttcattttcttcctcattacattatcatcatcatcatcatctcatgtagcggttgttgggcactaaccatggccttgggcactcttctacatattctatacaaattatttttcaattctcacaatcaccccggagagagatttgaggatccccattttgtaggtgaagaaattaaggatcaaagaggctaagtaattcattcattccctataatctttaagaagaaaagctgggtttcaaattcagatctgctaggatagaaagttttttttggagggggggagcggagatggagtcatgctctgtaacccaggctggagtgcagtggcttgatgtctgctcactgcaacctcctcctcctgggttcaagtgattctcctgccttagactcctgagtagctgggactacagacacttgctaccacatccagctaatttttgtatttttagtagagatggggtttcaccatgtttgccagactagtctcaaactcctgacctcaagggatccacctgcctcagcctcccaaagtgctgcaattacaggcgtgagccactgtgcccagctagaaagttctttatttagataaatacagctggagaatacttcttacaagtgaaagacttttaaaatggctgtaatggctccttgagaatttctctcttctaaacctagctctcactggcttctcattgccaatcttttatgtccaatttcacaatggctttgacccaatcgcattcatcttatactgtcccttctctctgccttaccctccaggcaaagaggagtacttgtgatttccccaatataattcttatcttctgcaacttgtccattttcttttctcctcctggtccctagtccttttccatgcattctgcaatctggatgacatcacaccattcttctaggctcagctcaaacaattttttctctgtgaagactttttatgtcttctcaacccctagctcctctgaccttcatctcctgtttctgattgtggagcacatatgactcagccagttcagatgctggcaccttggtcaagtcattgcccctttttgggcctcaatgcaagaatatgaaagaatccagagatcactgcatgctattttatcaaaatatgagaataggacagagtggggctccataaggccactgagcaataccagttcagcagccaaatgggttgccctgaataacaggtcccttctcaccacgactgctcagcagataccccctggtaggcacaaggtggcactggatagcactctctgctctatgcatggcatagaggctgtgaagccagtagatctgggagtcaagtccacttacagctgcgtgatcttgagcatgtcactttttccagtgcctcagtttccttctcactttctaaattttgaatgatagcttcatcagagattgttgtgatcatatgcatgacacatatacatgttctatacatgctccttcactgccttctctgctagctaaacattgtggccaccagctttgcttgaaaggcagggaagccccctgttcctctgatatttagtgaattcctagacagagaacatctggactctaaaccccagaggcttcctcagctggttcagagggctagcagctgcaggccctcccatgaatgatgggtttgtctgcaggcccagggaagtgggctgtccctgcaggcctcccctccgcctcacccatccttcctgctggctccattctgggtggttcatgctctgccccttgacactctctgattcctcagtgtgggtagaattgcctcaagaagtaaggtggtcaaactgacaaaatatgtagcaaattagattacgcagcaggcttttggtgagaggtgattttaaagatgccagtgattggaaatgaactggcaggaaggcagcaaatctcagaaaaatgttagatggtggggattcttcatatcagtggatgtttctacttaactgtggctgtgccacggcttcatttcttaggccttgatgttgtccacctgaaatggagctgagctttggatctggacaggaacagcaatggagcaaggcagttggaatctgacacagcagaatgaacttgagatttggagggcagaaatccttgtgagtgacctggggcaagtgacttaacctctctgggtcttattttcccaactactttccagggttagtatcatgattaagtgacagccagtacatagggagcatactttgtaactaaaaattatccacaggtattagcatttaagggttattggagcattaaatgagataacatatgggaagcatacagttagtgactggagcagaggaaaggacacatagttggtggctttcacgggtagtgatggtgatggttttaggaggtgacatggtgtagccctgccttcaaatgcaagctctgtcacttacttgctgtgtcagagactgaacaagttacttactcctcctaagccttgtttttctcatctgtaaaagggggctgataatatcttacactctggcagttgcgaagttcagataaactcagcaaggaaagcactcaacgcaatgactggggcacactcataagttatttacccctttgtcagaaatgagaaagctgtttggttctaagcactttatccacaactggtctcccacatatccagattttataggactcctagctcctgggaccttttaagggggtgaggattcccgtggatgccccagtattttctgagggcttctgtttcgctcttcaaacctcacactcacaccttttgcctccctctcgcaccttgtgctgatcctttagggagccctatatgatgcaggcaatagaccagctccattttcttcctaggaatgtggcgaggaccatcaaggtgatctgcatcacctttagatgatcagctatggttcacacattagttactgctcttattcattttaccgttgctaatagagggcattggtggtgaggccaagggactgcctggctctcaaggtgaagatgggtgttaaagagaacaaaccaagctcactctattccatgtacatctcttttattatcatttaaacttgactttagtatctggcaccgagtaggaattgagtgtcttgcacagaataggtccatagtaggaatttgttaagaattggttacagttgctgggcacggaggctcatgcctctaattccagcactttgggaggctgaggtgggcagatcacttgaagtcaggagttggaggccagcctggccagcatagtgaaaccccatctctagtaaaaatacaaaaattagccgggagtgctggcacgtgcctgtaatcccagctacttggggggctgaggcagtagaatcgcttgaaccagggaggcagaagttgcagttaggtgacatcgcgccactgcactccagcccaagcaacagagggaaaccctgtctcaaaaaaaaaaaaaaaaaaaaaaagaaagaaagaaagaaagaaaaaaagaaaaagaaaagaaaagaaatggttacattgactcttatcatgtacatgatgatgatgatgatcatgatgcgtaaacattgattaagtgcctactgtatgctaggcactctatgtgcatgctatttaaattctatctttgatgtagaaagtgttaccttcatcttatgcaggagaaaaaacaacaaggtcagggaggtcagggagtgacaggcttccatcacacaacagcccacgacagagacccatctgtctccagatgttttacatccagaatctatattcttctcctcagggtctaggccaagctgtcgctggaaagtggtcatcagcttttcagtggttgatccctctgctgccttggagagcatagtcatgggctgtgaggctgcctcctttgtccctcatcaaggatgcaacattccccaaagagcccttgaactgcaggaggcctgagtatgggtctgcatttttaaaaggcggaggttccttctcaagtgcctcataattgctgctattccacagattggcagccctgatgttcctttggcctctgaaaggtccagtctctctgtgtgaaatcaatggagtggcacctgggtggctgaccttcttcaggctacactccttactgtgcaccctctgcacacttgcctagaattgccccagtgagaaaaaagtgggccaaagaggcccttggagggatttgtattttaaagaagagctggaatctcggctcacagttcgagatggcagggtttgggccaggagaaggagaactgtggcttttcccagcaggagcttgtagcacttggccggtggctgtgcttgctttgtccgtagagaacaaagtgaagaactcttattccatctccagcagacattaatgttgttcagagaggatttattggctctgaaaccaaagctagccgtgttatttactggaaatgccatggcaggaactctcctttttaataaaccagaggaaaacctgacttgtttggagcaggctggttcacacccatcctgggctgaggcaccaagagcatggggggaggaactttctttgctcaggcgctgccgcctctgcctctcacagctggaaccagttgctttcatgcccagcaagtccagcccagccgcaggcttccttcacatagcctgctggtctgggcttccggcagcatctgcctgtgtgctttcatccaggaggatagggaaaatgctggccctggagtcagatagttccaactcaactctgctgccagcagtatgtgccccgggggggcactgaaactctctttgtgaggtgtggctagtgatgataacacccacttgggaagttcatttggaggagaaaatgagaaaaagtatagaaagagctgctcatggtatccgacacagggtaggtgctcaaaatatggtagctattcctatgatcataaaggatattaaagcataggtcatggcaaagtcaggcccagcctcaaatcccaactcctccattactagccgaatggcctataccaagttccataaaattctctgaatcttggattcctttgcagaaatataaactgtactttgttctgagggttactgtaaagatgaaccaaagtgagggatacacactggcactgtttttgatgcataagaactcagggaatgcgtagtaatatatatttaattgctgcatggtgggtgttcaatgcccctcagttctttgttgtaggaccccatgttagtcccacgttggatctccctggtgctgaagggttgtactgtgctcatattgttgtgggtcacctgctctgccagacaccgggcgctgtctctgcacttgacttccttccaggactcaagtgggagaaatattctcagcaggtgggcctaattcctgttccaatacctttcagaatccatctgaacttagggcaggaatctgggccatgcagagctcagattcaaaacaggatgcaaacagacacagattaaaaatgagaacctttttttcggttgaaaagaagaatcgatgatgctgaagttttagaccaaatttgttcttttccagagacactacactatggatacggtgggaggcctctctatcagaaggctggtgaaagatatgtctccagaccccaaaatggccttcttcacagcaggaggctgcatcaaaagcagtatctcttatgctacaaacacaagtgatggatccatgaagcttcagccccatactatgtgaagtcacataaggaaaataggaaggtgcccatcatgggtttgccctgcagacctattacatgtcagacactgtgctgcataatccacaaacagctcattcgattccctgtaacatgagtttgactatccttgttttatagaggaggatattgaggatcagagaggctaaggagcttgtgcagatttcacaactagtaagttctctgaagcagggactgcgtcatcttcatctgttcatgcaccagtggtaaacaaaatactcagtacatgttagcagcttgacaagtgttgtagcaaatgaggacaaataaattttctagccttgttttctacttaccccatactcccaaatttcttactgtttcccagacttgccatgtctctttctggtccatgttttcaggtctgccgttccctgtgcctacaagatctttctcctgtcttcacctagaaaactcattccctgcccacagaatgagttcagggaatataaaaaacaaacaaacaaacaaacaaacaccacacacaaaaaaacaaacaaaaaacctcccattccttcttcaagacctacctcagatgtcagcttttctgtgaaaaatttttaaagtcctttcagtagagttagtatctcctatgttgggtcccatagcaatttgagtacccctctcttagagcacttattacgtggatttcaaaaagtgattttataccctttcctttcattagatcatgagtggtttgagggtgaggccatgttgggattgcctttgtgcctgggtgtctatatcttggagggaaaaccatgccttgtcttcttggaaatatcccttaagcagattcacttcttttttaatttgaaagtagcatgttcggctcctacctcctgggagtggaaggtacttcccaggttgttgataccaagaaatggatacgcagaaaattatcatgaagtgactggcaattccaggctttgtggcagaaactcatcccaatatcaatagtaaattgatcttttgactcatactttgcttttctgtgagtttgacacacgtggatcaattcctccatgtctcactgtctggacatctagagacagagtcaggttagcccccaccagggccccaccctgggcctctgctcttggcctgacaaattcaatgtttctttcaatgactcagacaaatacaatgagcttttgctcatcacattttcagatgacaaaacagtggcagggatggtgattatgtcagatgacagaatcaggatccaaaatgatcgcaataagctggaacaaagggtcaaccaatttagcagggattaatactgggtccagaaactaactgcacagggagggattggaagggggtggcgtgacttagcagaagcatcaaaggcttgtttactcaggagtgagttaaacacaaaccagagagtggtgtggctgttaggagtggaagctaagcatgcattattaaaagtagaggaactagaaggaaggaagagattgtctccctggacttggctgttgtctgtcagcacctggaatgggatactcacttctggcccccacctgttaagtagggctttgtcccaaagtggttcatgtccctaggaaagtgatctgatactgagacatctcaaatccaagaaacctagggaatgttaccctgtagaataggcacttaagaaggaacatgattgccctttccaaatacccaagattttgtcacattgaagggtgattttgtaaggctaatggacagatttaatattaattggtaaaagtgtcagccagacatatctctgttctatataagaaagaatgctctaataagtcagtgctgttcactaggagaatgagctgccctgtgatgctaggatcttttttttctgtgaactgattgtcaggagtgttatgggagggattatgatgtcggagggaagtatcaacttccaggtgccatccacatttgacaggctaaaattccaagttatgtctgtttacctgttactttaacactgtgagtttccctagactcccccagtccagtgaggaggagaatggaaaagtgggtattattagagatgcactccatgctgtatctgttctgccaagggcggattattgaccttggaagaaggacgtgtccttcagtcctctctgtgctcagatagaattctttctgtaaggttcctccttttcctttgcaaatagacttagccctctaggccagcccaagccaatctgagtccctagaacatgagcccaagtccccttaactggtactcacactccttgataactatgttgtttacatttcatatccatgggtctcatatgcccaatgccatcataaatacccagaaggcagggccatctcttctgatgtgaagcccatcccccataatgcaaggattaggagtgaatgctctaaagtcagacagacataggtccaaattccaaattccatttctctcctttattagctgcatgggcttgagcaagacattaacctctctggggctacttgtctgtaaaatgggaatgataacaatacctgcctcatactttgttgtaagaattaaataaaatgtacaagtgaagaacttagcaaaatgttaacacaggtcaagtgttcgacatgcattagccactaatactctgctgtgagtataagactgaatagactatctttggctgctgcccactcttcagcctgggtttttcccgggctcttcactctggcctccctccccagcccctgagcccctccctttgggtttcaccaggagctgttcttttcagcaccctgctttctcctgagtgaaccccaccatttaagctgtggccactgttcctgcatcccaccgtctgtcttcagggtacatcactctctctcctcccacataaaaccgttccaattctgactcagatttttcttatttcaggggtaagctgttctctcacatgccttgcattttaacaactttcattactattgctcattttgatctgtttaataacatgttttaaactaatctcttgtaataaaaggatttcattactaatggagacagctgcgtaatgcagcaagttcattagttttacttttctgatgaggcctgccggagtgaaaagttctgcaactctgcagagttttggcaggaagctttgcctggtgaagctgagaagaaagaagtgtccagtgtgaggacagatccataggctgcagagagaaaagacacaaactctgcagtttgtgtctgcaaagactgggtggaatgggcagaggaatccctgtctggaggccaggtgataactgtgaggaggaatggcaaagccctgatggagataagatagtgtactgtgagccaggggctcttatgatggtgatcagccaaggtttacaggacccacctgccggactgctccctcgcagagataatgacacctacctctctaccttggcagttgtctgttactatacacataacgtgatatttacttatctaacagactgaaggcactatgtcttattcacccctgtattcctagtatctatccagactggcacaaggagatgtttgccaaactgaaacaaattcttttccctctctattttctctctatgtgctctctcccaaatatatgcagcttcaacagccaagtctaggctgatgacagaaacttttatctccacccttgacctctagagacccacctgtatccctaggtgtccactttgcttctccatgtgactgtctgtctcatattcaccttctacttcatctatctaaagctggatttctcactttcccctatattccacctctcttaccacccctgaagctttccaagagttattcattccagtgaatggcaccactgtatactcagttgaaaacctgggagttatccttgccatctctctctgccttactgctgtgatccaattagtcactaggctatattgattttacctattaaatagaatttgaaaccatccacttctccctcaatgactttactgccacctctctgagctgcagccatccctcacctggactctaatttatacctaatgccacatcattctccaaccaggagcaagagtgatctgttgggtcacatacgcccctgctctatggtttttaacctaagagcaatcccattaacatccttaatgtggtccatgggtccctggaaagagtggccccttctgatctctcggcctcatttagtgtcatttactgcatgactcgcagacttcctgcgtgtcttttattttagttcctccaacacatcaagttgcttccctcagaaccttggcctttgcatttccatgaagacctctgagtggctcgtgtgtgactggcactatgctaagcgtttacataaattctttggggtgtgtgtgtgtgtgtctgtgtgtgtgtgtgttttgacagagttttgctgggattttagctgctttagagtttagctgggtttacaggcccctgccaccaagcccggctaatttttgtgtttttagtagagatggggtttcaccatgttggccaggctggtctcgaactcctgacctcaagtgatccatctgcctcagcctcccaaagtgctggaattacaggtgtgagccactgcacctggtcatttacatgcattctttcatttacaaatcacaacaaagctagacaacaagtactcttctatctccattttatagatgaagaaattgaggctcagaaagattaaggaactcatcaaaggattcagacccagctgtgacccagtccttgcggaacaagccaagtgctaacaggagtgtttgttggctcttttctcaatcagatgtccaagtcagcagaggggacttccttctcaaccagggagttagtcctgtaccaacagagaaatggttaggacctttatcatttttctctttctgcaacctctttctcattcttctggcaagacacagaccctctctcacctagccagatgtagtaggctgagcaattctgcgcgcctgcgccactcccactttccgctgccccgaaacaaatcagatcagagtctctggaacctgtaaatgtcacctaatatggcaaagacgctgcagctgtgattaacttaaggctcttaagatggggccattaccctggcccggaaagcaatcttctaagagagaggtacatacaacaatgtaactatagttaacaatactttattgtatacttgaaatttgctaagaggggagatcttaaattttttcacctaggaagaaaaggggaggcagaggaaggtttgagcacagacagaagaaaaggcgatgtgaatttgataccagcctggccaacatgatgatttcccatctctactaaaaatacaaaaattagctgggagtagtggtgcgcacctgtaatcccagctactcaggagggagaggcaggagaattgcttgaacccgggaggcagaggttgcagtgagctgagattgagccactgcactccagcctggacaatagagagagactccatctcaaaaaaacaaagcaaagcaaaacaaaacaaaacaacaacaacaaaacaaacaaattaaaaaaacaaggcaatgtgatcactgaggcagattgaagtgatgtggccactggccacaagccaagaaatgccagcagccagcagaagctgaaagaggcgtggaatcgactcttccccagagcctctggagggggtacagccctgctgatgtcttaacttcagcctagtaatacgtattttggacttttggcttccagaactctgacagaataaatatctgttgttttaagcccctcactacatgtgagaatgggcccaggactgctggccacacagttttcacctttgtagaaaaggtgatctgatcaaagtacacccataccacagagaatgaaggtgggtggaagttccagccatcccagaggctggctgcttaccctctaccccacttctcatgtgtgcatattcatggatggtcttttcccctttcttaaggatacagacttttatcagcagtgatcactcattcaccaggatggctctgactgcatttctaggaataatttggtccagacctgcctctcatggtaattgactagttcaccacatggcatagactagtgctgtgagcccaggtgtctcttagtacaacctaggctctgctgtggtaatcaatgcctgccccacaatttcagtgacttaatatagcaaatgttcacttcttgctcacacaaagtccaaggcagtgtggctgcactccctgtggtaacccagcaatccaggctgcttccaacttgcaagacctccatctcaattcatggcctctgcggccacatcagcagccctgagctcaggagctcatgaagaagttactcccactcttgtttgtttgtttgtttttgagacagagtctcactctgtcacccaggctggagtgcagtggcacaatcttggctcactgcaacctctgcctcccaggttcaagcaatactcatgcctcagccacccaaatagctgggattacaggcacaagccaccatgcctggctaatcttcgtattttttgtagagacagggtcttgctgtgttgccctggctggtctcgaaatcctgagctcaaagcaatccacccgactcagcctctcaaagtgctgggattacaggcacgagccaccgtgcctggctctctcccactcttaactgcacgcaaacagatggcacaatgtatcccttctgtttacagctcattgactgcaaccagtcacctgagtctgaacttaactgcaaaggaggctgaggaatattgatatgaacactaaaagaagaggaaaatggatatagtaagacttacaaatgaatactacagggaggtcaccccaattctgttagtggattctaggctcaaagggaaatctcatcaaatatgaaatattgctgggcagggtttcagctaatatgtcagcagagcaaagacaacatgaaaaaactatgaggctagctgtgatgagtgaggctgggtaggaaattaatgatgactcattcaggactaagacatctagcccattagttaaatctgtctgcagaggaaagatcaaggaagagatttggaaagcacttatcacaatagcccctgacaagaatattctgtctgtcttcatgcatgtgaatctgtaggcaagcatgcattcctgaaaatcctgagatacttgggaaactatttatgaacaggaatgatgataagatgagtttggggaaatgaggcttgagcacaaacaacattttccaagggttgtgggtaaataacaatgatgagtgaaacacaatacacttcatcaagcaagtacgaatgaccaactctgtgctgggctccatgtggagcctcaagaatcacggcctgctgaggcccagcctgagactggcacatgctgctccttctgcttgaaatgtctctttctggctgggcgtggtggttcacgtctgtaattccagtactttgggaggctgaggcaggtggatcacttgaggtcaggagtttgagactggcctggctagcatggcaaaaccctgtctctactaaaaagacaaaaattagccaggtgtggtggcacacgcctgtaatcccagctactcaggagggtgaggcaggagaatcacttgaacccaggagccggaggttgcagtgagctgagatcacgccactgcacttcagcatgggccacagagcgagattcggtcccccttcctcaaaaaaaaagaagcccctttccctcttctcttttcttcctttagtgaactcttctctttctttaaaagtgcagctcaattgttttgtttgtattcatgtagttagtaattatatattgctatgcaacaaatagccccaaaattttgtggcttaaaaaactcaccatgtattatctcagagtttctgtgcaatccaggaatccagaaatggcttagtttggtgcctctgcctcaaggtctctcacaaggctgtagagtgtctcccagggctgaagactcaacatgggacttctgtggttgttagtggaattcagtttcttgaggactgttgaaatcctcactcggctgggagccaacaagtcctctgccgctaggacctctccacagggcagctcataaaagggcaactggctttactcagaatgcgtcagagcgcacgggacatcatgcaagacgagagcctcagtctctttggaacacagagacaggctctttgagtctgtttgtcatctcagaggtaatatctatcacttttgccatattttcttcattagaagcatggcactcaaggctaacccacactcaaggggcagggattacataagtgcttgaatacaggaggaagagatcactggagctgtctgagaggctgcctgctgcatgctgctttctccaggatggagcagctggcagacagagaaagagggaggaaattgtatagcctccacaacatctctaacaagtcttccttaatcttctcctaacaatgtcccagattctgatttgctgctcagaatatgagagctgaaatggactttagaagttatcttgtccactatccttattttatagatgatgaaaaatacatagaaggggtgtatggccttccagaagggataggattatttgcagaatgggacctagaactcaggtcacctgctttttccaagtgaacttcatccttctactctctcccacctactgtcttcctgatcttttacaacttgatcagcattggtcattttatagaaattattctctcaaaggtcacctaaaaacatcttggtcaagcattcaatcatgagttactttttgagttctcacctcttttggcttccatgagaccacagaggtctggtcctggcttctcttagtcctccccctgcactaagcaaaaagttttttacaatatcccagagactcagttctttgcctttgcccttttcctgacatctaagtccttgatggacttatgtggtctcaggactttgacgatcacctctccttgccttgaccttgagttgcactcaattcccccaatatctaagtgccttgaccttgagttgcactcaattcccccaatatctaagtgcctgttgggcgtgttcactgacatgtcaatgttaatcatatataaactcatccatgttagtatgaagacctccaactatcatttattgaactcatatatgtgccaggtcctatgttaagtgctttaattatattttcttatttaatccttccaagaacactctacagtaaataataatcacattttgtagatgagaaaactaggcttagagaggttaaagtgacttgtaggatatcctataacttacaactgatccatgttcttttgattccaaaatttttgcttttaagcactgtactcatgatctccccaaaaccgctcctctggtctgtcttatttctgtttctgttttgcccttcgccaatggattcaaaatcttggagtttaaaacatgctatcatgtggaacacctctaacacctctatgtctttgcatgtgttctttctgcctgaaagtcccctttttctttcttttcctttcttccttccttccttccttccttccctccttccttccttccttccttccttccttccttccttccttccttttctttctttctctgtctctctttctttcttttttttttgacagagtcttgctctgttacccaggctggagtgcagtggtgcgatcttggcccactgcaacctccaccatctactgagttgaatagattcttatgcctcagcttcccaagtaacaaggactacaggtgcccaccaccacacccagctaatttattgtatttttagtagagacggggttttcccatgttgccctgactggtcacaaactcctgaactcaggcaatctgcctgctttggcttctcaaagtgctaggattaggggtgtgagccactgcacccggccccttatcctaatcatcagtatgcatctcctcccctgacctcctcccctctctcctgtcaccacactgccaagattattacttcttccacggtgtcacatggtcaagtcacagtgagcttgaaatttgcctcactggctaggtcttgcacaggaaccaaggcatcctaatgttgaaatggtgccagagaatgcccctatgacagtagctaatccctgagctataatggtttggatatctatgggcattcctctgaacgctatactttatagaagcagagaccataaatgttcacctttgcagctcctgtcctggcagcagacacatggtaacctagtcatctttgatgcatctcattcctttaattcccacagctaattagtagataagccctgcagactgttctttgttagatttttcttatctctttctcaatttcaatttctctagcccccatcccaagtctatgtctcctacctctcatgcagcccattgtaatcacttccaaactcacctcctggccagctccttgctgccttgtccggttcattctgatgatttctattctattaacatttatttgtacacattgcttgcctgctcaatggctccctggtgcctataaaataaagcccaagctcctgatcttggctttcaataatcttcccaatgtaccttaatgacttatcccaccctccagtctcagagtcattgtggcactgtatgaatgacctgttgtagccattcaccatggctttaatgctcctctgagttccacttccatgtcatcgctcatgcttttccttctgtttggaatgctcttccttctcccgcccacatatctgaactgtaccgtgtgttcacatcccagcttaatcctcacttctccaccagccttctctaaccacctgagccatagcaactttcctcatccagtgtaggagaaaaagcttgaaccacactatctgagagctatggatcaacatttcaaccatcgactagttgtgctgctttgggaaagttatataacttcttaggcttagcaaaatgggaataataaaacctatctcatagggctgtggagaggatgaagtaggggaatatatgtgctgaaaggaagttccagttggtgatctaagttatggcatcctaagattcagatggaaccaggcacacctgggggttcatggagtagacccacaatgccatcctgcaccaagaggaagaactcatcatccatgatgtctaagagtccaagccactgggcttgactgaggccatatgttgctgacaaggaccaagcatggaatgaagggtctgggacaggggaccatgcttctcaatttaaactccaacacttctacttagccatgtaatcttgggcaagtttattcacctctttatgtctctctttccttgtttccaaagtggggattaaatatggaatctatttgataggattaatgtgacaataagtgaaacacgcataaagagtttagcacacctctggcacactgtaagcttttaataaatgctaactattatgttttatattgttattctccagcctagtctctatggagtttgctacatcccagggtgacagggctataagtaaaaatggaaagagatgtttcactaatcatccctgggggagcccagtgggagcagagggaagcctgctcctagcatctgttatagagggtagtgtaggtgagaatggtgccacagaaaacagcctaaaactgggtcacccatcagaaggggtagagcatcagctctcagccctggctgcaagttggaatttggtgctttcaacaaatgctgatacttgggcctcaccaccagagtttcagattcaaattactgggctgggcccacatatggattttttttgaaagcctctcaggtgattctattgtgtagctagggttggaaaacacttggtcaaggaaatacagtggtcaaggttagaataatgtgagcagggtatgagggacagagagagaagaggttcagagactagagcagagctgaggggacatgatcccagagacagggctgggactagggtgagccaagtgaggcacccagggaggcaaaatttgtggacagtgagtgcctccttaagttttgtaccttagactcctaacttgcttcaccttagaacattcctgcctagaaacattcctgggggcttgcagcaatgtcttaaatgtttcccatggatgctggtattggttggtcatgtcgtttttgaatcatatatacaaaaagggaaaagactaaatttctactctcattgatcatacatccatccacctacccatctgcctatccatcctttcatccacctacacacccactcattcattcacccatccatccacgcatccatccatttttccattcacccatccatctatccatccatccctccctccctccctccaccatccatgcacatatctatccatccttccatccacctacccatccatccactcatccatcatttataatttcattcatctttctatccacccatcaatcatccattcttctactcatccacacattcccccccacccactcacccacccatttacccatccacccttccatcaacctatccattcatccatccatccgtccatccatccatccatctttccatctgtattagtccattttcacactgctgataaagacataaccgagacgggcaatttacaaaagaaagaggtttaattggacttacagttccacatggtgggggaagcctcacaatcatggtggaaggcaaggaggagcaagtcacatcttacatgaatggcagcaggcagaaagatcttgtgcaggaaaactcccccttataaaaatcatcagattttgtgagacttactcattatgacaagaacagcataggaaagacctttcaattacctctcactgggtccctcccacaacatgtgggaattcgagatgagatttgggtggagacagggccaaaccctatcaccatccatctgtccatccatctatttgtccatccagtcactcctcattcacccgtttattcattgaacaaaaatatattgagagcctattatacgtagacacctttgtgggcatgttgggaattctgtctctggccttatgatggggaagaccagaaactttggagccagggtctgggacagaggggcaaggcaagtgtgattttcccatgagatgcctggtaatttggaagaaagagcaatgactttggcacttaccagttgacggattttgaccatacttcttaacctccccagatgcactttcaaaatttatgaaatgagaacattaggtggtggggatgattgaataagcacctaatcatataaggcctgattcacagtagatgtttataacaaaggccagagaagctgtaaatggaattggaagaaccgtcagactcttgtctttcactttttaatcaattggaggagaatatcagattttccctacctaaacagacctcgtcataaccagagaaacttaaaacttgagattagaaggaatggtcatttagtctcattccctcattttacaaataaagaaacagacccagagaggggcagtgccttggccaaggatgtgtagcaagaagctcaggatactcagtccaagttctcattgcagcatccaggagcagatgcacctctggcttctgctaaatagaaaatcaacctttgtaacaattacggttctgaaactggaattgtcacaatagagacaaggatcaaaatatcacatttcctgaatatctgctatgtactaggcatacataggcctgttatctcactcaacctttataagaacgcatgaaatgaagtattatgattatttcctttattttaccgatgtgggaaactgaggctcaaataaattaagtgattttctcaggaacttattgcagggaagtggtggtgctgggctgggacctaggtctttgtgacttcaaagctcatactctctgggctttacctcattgcctcacttatagaagtggcccccaaataatttataaacatctatgtgcctaggactgtccctaaatcactcatttgaggctaaggtagaggactgatagcatttctcatcatggggacatagttagatcacctgtctaacagtctttcatataatcctgaaaatatatcagaaggaacttcagtgatggagataggcattgggaaatttacctagtccacttctctgcctcctcaagtacctgaaattctgccattagctgttcatttcctggctgatttgcggctctcatcctgaataactagaagtagggatgaaggcactgtaggttataatagctaggcacaagtgagtttattcttccctcccctacctgttgaattctgactcatctttcacggcccagcacaaatgtcatcaaacactagaacttacaacatattccgagtcatccctctgtgctgtggggtaggaatacaaggattattaaggaagcacaggtcctgcctagattgctcactgcctggtgggaggccagctgagaaaatgcacaattacagtgcaaggtggaaaagacaacagaggacacaaacacagaggtgttcagaggggactcccaaccctaaagagggtgggatcagagactatgcctgttgccaaattcccctggaatacagtttctccacccttagttctcacctagcactttgcatgaccctgtcaaagcacttatctaggctggccatttgtgaaggtccatttctttgtctgtcttaggatgtgagctcctttggtagaagtcactctgctctgtagtccctgtaactagcaggggaccttacatgcagcaggtgctcagtaaatgacaattgaaggaaataattagaggaaatatgggatggtctgaagacaagagattggtggcaggattaggaaacttagaagaatgatatagacatgtgaggggagagaagctggtggcagcaggttcctctaaagaacattggatctacttttcatttttactagaactgtccctggggatctgggacagggtagaggccaagagatagcccttggaaccctagagaaagagattcttcagcctcccatcaccccatcagcaaaaggtcagtgcaacaagaaagctcagggcatagctcaaggcctagctggaggagccccattgggcattttccatcttccacttctacaacactttgatttgctcttcatgttgattgagatcccagttttattgcaaataattaactgcatcatattttaaaatcgttctttagtcgaatcttattctttttgagtcacagtgatttatatttgccaaataatgaccttctcaatcaggatcatagtggaaaaaaaatcttagagtgtgaagtttcacatgatggtgggagcagtgcaggggatggaggaactacagggagatgcctctgtctattctctttccttggtgtcctgacactaaccgactctatgtttttgtttttccttggcttgaccaccttctaacataccatatagtttacttatatactgtgtgtattctttattgtttatcttccccttctacattagaacaaaagctccaagaagttaagaatcttttctattttgttcactgatgtatctccagcatttagaatgggccccggaatatagcaggtgcccactaaatacttgttgagtgaattaataaataaaagagcacgggttaacacaatgtaagtttcagaagccaccctggataaagggaggagataacttacaaaatttcaagcccatgacttttggaaacctgttggaaccaagacagcattgggcctcttggtgatgatggtagcagtcattgtggttatgatgctgacgataatagtaaaggtgattatgtggtgatggtagtgatggtgatggttataataatgatgatggggatgatggcagtgatgatagtgatggtggtggtgatgatgatgatgatgatggtgattatggtgatgatggtgttggtgatgatgaagagagaatgaactccctcacccttgaacctcagagtctatggagttttttcacatcattttcactttggtcttcacaaaatccttcagagctagcagcagtcaacatgattgccacctttttcagaaaccactaggatttaaagtgatgaagtgacttgcccggggctacacagccattgaagacagaaccaagatggcaactcaagtcttattgtccagaagaagctaccatttactgatttcctcttgtgtgctaggcatgctgcaaagggccttgttttcctcttttctgggaatttgggagtcatagactgggacatatcatcacagataccttggaagtgatttagcttcagatagtgatgctgccattttgtggtggccattttctactctgtatccagagaagcagagaaaagaaggctggagggagagagaagaataccatatagagatgagcaaagaggaaggatcagatggtcccagggaaagaaatatggggttggaggtgctgtggtttctgatgctttcctgggccttgagttctgtccttcatgaggcccttctttctctactgcccctgggctctacttataaatccaacttcacccaagatggcattacaaggaatatgttcacttcaaacaaaggatctctgacaacctgtttgcttagcccttaagaaatcaaccagacaagactcctttgctggaggatagccaaaggcacactggggtgagggacgatcaggaggagggcttgtccttgcaattcccagtgattacatcccccttccccctctgtctccctcttctacactctctcctgacccagaccaacccactcttcatccttgggtggtgttgggaacaacaacaaaaaatctccgatgaaccatctaaatcccagtatggcctgttccccacagcatgctggccaccatatgcaggcatagtgtccagacctcatcagtcactatgaatcagcttctgctttcagtgtggtcacagttttgtgatgccccttccccttaatctcatcataagcatccttttcccagcctcctggcatttctgatgggagagaaagccacaggcagaaagccttgcccaagagttagctctcctaaaaggagcgtgtgtgtgtttgtgtgtgtgtgcaccatggtagtggtgggcaggaccacaccgtctctgggttcagtgtggccaccattccaccctacatagcacttaaaacctcatttctttggggaatagaaaagtgaactctgcagacaagcctgggaccctatctgtctcattagttaacttcccaagaaatttctctgagaaggtaacaaaataagcagacctgggttaccatagagacctgtctgcacaggtctgggccagatgtctgttctggaccatacattattaatttcttccttgccagtgaggaggctggtctgggttaaaactgcaaaccactaaatttggtttccccaccaatttctctcttttctcctcaaactgcaaagtcatcttgaggtaggatatatggaagggacctgtgagatgggggacaactgattggctgaggttctctgtgtgtgaggtgccagactccatgctccacctatgtgtccttgttgaagatctcattataaggaagaagcagtgctcagggaatctgtcagggtctaaaatttcaacaatgtggactgtcttcagaccagtcttctggtatgggaagaccaagcaaaaagaagtgagcttagaggacagtagaaatgagtttgaggggaaggagctaaagagaaatgtggagggtgaatgttggctggagtagatttgtgtcatttgtgagtgttgatgacctctccgactctactcccttcttgaagtatacctgataatagggagatttatgagccagaaatctctcttttgggaaaaactggagcttctattctgagagctgaaaaggatctagcatcttcttagaaccatgcaagcagcatacaatcaggacttaaaaaaagatcatttattaccatttgattccattccaaggcctattctatgcaaaccactgtccaggggctgagaattcaagttgttcatatcttccctttcacctgtcctcactgttgactctttctggttcctacctgccccctatccctgccacccctgccacccctgccagcctctctattacaaacaggcatctctgttttcaaactgcctataggttgagttgtgatggtttggcaacagtttggtgacaaacacttccaaaatctcagtggattctcagtggattaaaacaacacagatttatttctcacactgcacctctaaagcaggtcactggagagatgccatatcgtcgtcactcaggggcccaggctgacagagagttggccatgtgaatgacatcgccgtctcaacactctaacagaggagaacacaaggggaatcacatgccagccttgaagtgcttccatccgggagagccacctgtcacttccactcttatttaactggccaaaggaagtcacacagacatgcctaactccataaggctaaaaaagcataatcttcccttgtgttggaagaagagaaccagaactactggtaagcactaccaatgtgtgcttcgccatctgtaatctacctccctaattcctttctccccctcttccctctctgatcatcaatctgaactccattccttgatcccttgccattgtagtgttaacctcttccatcccttcctttgcctccatgcccttctccctaactctgccacctgctggctcccctcctgccctcctttgtctgttttccacccagcccctgatggtcatgcctccatcgcttggctgcactggatagatgtgatggaatacaacctcagctctaactctgcaagtttctcttgcccctaattgagcttaatgatttatgtcttgtaatggacacaaatgggcaagaattcctggatctcattaataattttaagtatgccagaagtaggattttaaatcctaagcaaaaattaaatgaccataaaatctttgttcgcttcccaggagacaatcctgtttcaacttgacagcttaattaaatgctgggtaaattggacacaacacttaataaacaggacttggcaggcctggaaaggagagagcagagaggtgaggatgggagaaaatgaagctcacaaagtaacaaaaggaaattaagttatgcgaggtctctctcccatagtgtgacctttctgggagcttcagatatgtttaaatgacacgaatgacccagaagattgtgaaagaattgattctcttctttgactccaattccctccatggccatattgttccacaaggcaagaaagctgttgtccagaaatattcttggaggtctttgcaagatctcctttggatgtttgactcctcctggaccaagtttcttgcaagcctcaagcccactgggaaagctgctggtaggctggagctgaggggttagatctgaggggccacactgcatggagggctccatgcacaggctcatatcttagtcttcatattttcttctactttatggtcttgccttatcctggataaggctttttgatcatgactttgtttattttattttatttttttaagttccaaggtgcctgtgcaggatgtgaaggttttttacataggtaaacatgtgccatggtggtttgctgcacctatcaacccaccacctaggtattaagcccagcatccattagctcttttccctaatgctcttcctgccactgtccctcaacatgccctagtgtgtattgttcccctccttgtgtccatgtgttctcattgttcagctttcacttaaagtgagaatatgtggtgttttgttttctgttcctgtgttagtttgctgaggataatggcttccagcttcatccatgtccctgaaaaggacatgatctcactcctttttatggctgtatggtattccatggtgtatatgtaccacattgtctttatctagtctatcattgatgggcttttgagttgattccctgtctttgctattgtgactagtgttgcagtgaacatacgcgtgtacgtatctttataatagaatgatttatattcctttgggtatatactcagaaatgggattgctgcatcaaatggcatttccagttctaaatctttgaggaatcaccacagtgtcttcactgatcattagagaaatgcaaatcaaaatcacagtgagataccatctcatgccagtcagaatggtgatgattaagaagtcaagaaacagcagatgctgctgagattgtggagaaataggaacgcttttatactgttggtgggatcaatcgtgactttgtatggtcaaaatatttccatctctactaataatcagattctttagattctgctgcctctaccataaacatatgctcagcctgggtcctggctgcacacctccattgctagtgaccatgcagggctcaccaagagttcatgagtgcactcgggcagagcctgtgagagcctttggttactattctctttagcatctttagcagaatacaggtgtctcatcatataaatacactcacaatatattaatagaatttgaagatttagaggtgggcacacagcttctacctccacttccttcttcccttctgccttctcctcagtcagaattactttcccattaacatttgggaagatcatatctcttctccatcagttgtctagctgggttgagcttatcttgcatttgaagtaatttacttatgggcagctgccacatgctgctttagttaaattaagactgtctatcttacttgcacagaaaaaatgttttaaacaaatcaagagattaaaatgtgtttaaaagtattttattcttcagtgaaaagccttgtttggtggaattggctacaagcccctgagtaagtgaaaataatcgctcagacaggtgtgggatttgctgtacttagtacaagaaacaaaccttccttcatcatcagggaagaaaccagccttcctcatcaagtaaccaacctccatcatcatttgacattacccttttacttctattaaagaatcttgtaaacctaaagctagcagaaaccttggcaatcatctgggtgaacagtttacaggtgaagaagccaagctccagagagaggaaatgacttttccaagccccacagtgaattgcagctgggacatcagaaagatggcttcatgagtcagtgaatgatagtaacttacagagagacccatggacttgttaatagtggctaccgggatttctagcttagtgcaatgcttaacttttgtgaagtcacctgctacatgaaaacaagtttcatttcttttgcactgacttccataaaacatagagagatattcgtgtttaaaagacctcagcagcttgagttgccaagtttgggaaaggaaaggttcaaatgatagagtaaaagactaggcatgcttagtggttgctagaactggaggtggggactaggagtgactgcaaattaatgaacatgggatttgtttctggggtgacggaaatgtgctaattgattatggtgatgattgcacaactctgtaagtttactaaaaattgttgaattgcacacttgagtgaattttgtagtatgtaaattgtatctcaataaagccgtccaaaaaacaaacaaacaaatgaaaacaaagtaatgcaaaataaatacaagactaagagccagggctcagacaacactttcaggacaagagcaaggtagaggatcaatcctaggcctccagattagtttgcttttagcctctcaaaggctgtctacttctggacagaggagcaacatctgaagcagatggctcaacttccaatcagttgcactccagacccttgcctaagagctcagttttgacctgacagctcatcagctcctgtcaaatgcatgttgagttgagcgacattaagagggacaacatatgcatcctgttaccatgcactcttctgggctgtggaaatcccagagagcagaatgtttgcacttctttagcctagatacacaaagaaatattttgccactgtcactatattattgtttcagttttatcaaagttcaatgaatgaaatgaccatataaagatgatataggtatttctggctattatattacccattatattactacttgatgtcttttccatgtgacccaatatagcaagtaccctatagaatttagtaccaagaaaaaatgttctgtcctaaaaaacttgaatgacttatttgataagcagtgggagctactgaacccaggtggcttatttttttttttttcttttttgtcttgaacgccaggacactctgggctaatgttagagtagggggacaggcatgtgcttgtctctgatacaactgttttccatgctctctgctcagctgcatgcctctctgtcacattcattcattcaattatcaaatgtttctcaagggcatcatatctccagagttggaatgatgaataagacctggtctttgcccccatggaggaggcagatatgggaatcattgcaaatagaattgcatggtagggggctgctttggatgttatgggattagaaaaaagggacaataggaatagaaaaatggggtacaactttccaaagtagtgtattaactattttttcttactttctgtattattgatgctctggcatttgtgacctcactaactggagagagatcacccctcccaggactagccaattcttagagatagcactcctttctttctttctttttcttttttctttcttttttttttttttgagatggagtcttgctctgttgcccaggctgcagagcagtggcgcgatcttggctcactgcaacctctgcctcctgggttcaagcaattctcccgcctc[131 bp omitted]ttggcctcccaaagtgctgggattacaggcttgagccaccacaccgggccaagacagcactcctttcatatgtaaactaaccagttcagagcccataccctgaaccatcttctgtttctggctcttacaccccaggagacaatattcctccactccaatcacccaggggccaggtaccagacagttagagacgaccctgccagcccgagcctgcgagcattatttacactagccaatcacaaactttcccctgccctgcctttcccatggaaaatgcaaaacaggctctttccatgaaaaaaaacctgggccaggctttgccctggctccttctgcctcctgacccaacctggtgttttccactctggctctggtgtgccccttcctcttgggaaatgtaagtaataaaaatatttcaatgtcattggcctctctgtgtcataaaatctgtgagtataattgatataggtaaagcttgatgagcaattgggaatttttcaggggtaagaatattccagaagcagagctcacttatgcatcagcccacagacttgatatgagaacattaaggtgctgtgtctgatgcacattttcagctctttcaaggcagtctgcgaacattcctctttcaatgtggacggggcataaattataaataatgatgggtgggccaagtcttatttgtacaagactgagttttcctcaaggttctgattgctctttcttttgttctgtcaaacgcagaacacagaacacagcactgtgcagagctggaatcccagcttgctctcttattagctgtgtgtccctgtacaagtttttaagctttctgtgtttctgtttccttgattataagatgagaataacaccagtagcctcctcagagagctgccatgaggattaaatagattaaaatgtgtaaaacatttagaacagtggccagcagatggtaagggctatgcaagcatttgctaaattatgttctgaatcctgcaatgtgaggagtacttattaagaccatggaatccataaagatgtggaaggtatattcctacccctaaagagtttacaagtataatgagagcctagagaattctggaaaatcaaaggactgttcaggaaactgtatttgcagaagatgttgaaaatgatgaaagttataatagactaatgttttggcctttctccagtctcaaatagagaaggaagtagagaaagtgaaacattgtggaaagaatgccagattctgagtctgaaagacttgagttcaaggtcaaggaaagctggcttcctagagctaccattttctagccatgtaatttagttatttagtttctctgagtcttaatttttttcacttgtataatgtagataatattatctactttagcaggtgggaggaaaagagataatgatagcaatagctgacatttattgggcattcgccaatgtgttgggaattgaactaagagttctctaagaaaatcatcttggagaaaaggacaatgtctcagtgcccaaggtccctcaataataactggctgatctgggatttgaactcagacactttgattccagggtttgttctaataaccattattttacactaaatctctcagaactgtactagagccagcaggcactcatataataacaaccattgttattaactgtgtagtatctttgatccattcggctaatgcctcttgatcactttaagactcccttcaagtgctatattttcttcccatccccagaaccatcctcctgatactcccataatgcatcactcagggcaagtatgggcctaattctctaaaattctcaactttatattttcttcaagtgatagagaaaagaggaaaagttctataggatcccaggtacattaataaaaatttaataaaataaagttagtaatgaaacagtctgattagagaaataatttgagcttcaggcctttgcagatggggaaaattagattggataaatgatttactctaaatagatttaatgcaaaaacattaggacctgcaagacaagcaagcccaaggaattctgggaaccaggttgggattggcttggcttggtagcaaccctatagtctctagccaggtcaacttaggtattggatcaaatgccaggccaggacagggagtgtattggctggcaacccagccaatgagaagtgcctaatggcttccaaatgtcagcatgatgatgtcacttccaaatccttcctgttcatggtggggaggcatttggggccaccaagaccacaccagttccaaatctgtggcttccctgccctttagaagaagtgtgccacatgtacccgacagccttggggaatgacttctcatgagtttcctttcttgctcagatcctgggcagagtttgacatgcaggagatgctggtgggacctatgcacattaatcaatttggctgaattatctgtaaaaaagagagaaactagcttaattcaataaccaacgtttgttgcattttgtggctttccttttctgttctgattttcactccccaacaaatgtcatgtccatgtgctgcagtggtgagaacaccaggaacaggaagacttggttctgtctcttccatgctgggctatggttgtaggtgaagggtagtggggagggcaggatacttcagtacaatgtagtgaaaagaggccagacgtgggtgtgaatatgtatccggtacttagctatgtgagctcagtttgtgcatctttaaaacacaggataaacattaacttaaaaatacaaggcatatgtaaaatgatgctatagtaggtaactcaatttttaaaaagttattcagtatttattagatgcttgacaacacacacaataactatcctcccttttctcccctttctccactgagtaataacgcctttatcctccactccctggatgaaaattcatgataaacaaatgaacaaacaaacagtagatttggagaagaggtccagaaaccacagagcaccaatctgatctttgcaaaacaatcaagaataccttgatgtctcgggtaaggcagtggagtggaaaagctacacaagtggggaacgaggggagccacagagtgagggatgagagaggacagggtaaataaatgctcaagcaatgctcagagagcccagggaagagggtgtgtacagacagaatattccagtcctggctgggcgtgatggcccatgcctgtaatcccagacccttggggggctgaggtgggtggatcgtttgagctcaggagttcgagaccagcctggctaacatggagaaactctgtctctaccaaaaatacaaaaaattagccagaagtggtggtgtgcgcatgtagtcccagttgctaaggaggctgaggtgggagaatttattgagcctgggaggcagaggttgtagtgagccgaaatcatgccactgcactccagcctgggtgacagagtgagactctgtctaaaaaataatttttttaaaaaaaagttccactcctgcatttcctccagaggtcatcaactccaatattcaaggcatgagttcccaaagtgaggtgagaggcatctgcagtggggcatcagcacagaaactggagtgaccttcaaagagccaggtgctctatgtagagcccttccttcccaactttgggagagactagggatcagacttaacaccttgtctgagaaaactccaagggtagccctacaataaccctaacactaatgttaggagtttggccagaactggagagaatgatagagatgcgtgaagttggcatcagccttgtctcagtcatggtcactgtactcctattctcttattccctcacccctccaccaccaattaattcatccagatcaaatagaatcgtggttaggagaggagcgtttgcagcaggcagcagtatcttctgaagttctggtaaaggagagtcttgcggaggaggaggccgagggagctggaccatttgtcttatgtgtgggggaggggtatgaatacagctagaatagagcctcagaaatgaatttgagcctggctttaggaacaactgatcctccaggaccccagcccagtttgggcggcctcttggccaagttttgttctattctagcactgtttggcttgattcagcccacccccagtttccacttgtccaaatctgcccagttgatccagctcaggccaacatacaccagtacaaaccagctcagggcagctcattctggacccctcagcaggaccgtgtctgttccattcagttacagtggctttagacttacagttcacaccattgaggatgtatggaaattggcagatggtcagcctaggagccagcttcaaagatgatgatgtgatatgttgtagccacctgagacaggtagcaatgaggctctaatcgctgactcttctaagcctggccactctggatatcttcttaccagataccatttccagcaacagtgggcaaaatgatgaggggccacagcacccagaaatcacagccccggaacatgctgctctgaataaaaaatgtgtgttttgtgctgaattggacaccctcttatagtagactctcatctagatgagtaaggggtactaagggtttagaaacgtacatgagagaagaacatatcaattgcaagaaacctatctttagcttattatttctctctttgaattgggaaaaaaattaataatccagcttaggtcaaaaacatatccttctgcagatcagggcttgagaactactgcttctggagggactcaagccccctcggtaagctgccctcagccccatgcctgtggctcgtctccagcctcccagcccatcccatcagatcaggctgtagtctcagtgcttgtccttgccatgaggccctcgtgcccattcttctccccatctgctgcctcctttctgttagtcttggactcttgtattcgtcaaggcccttccctaagttgggtgccctcaagtcactcctctcttcatccatgactgttgtactgtatcatctttgtgagacaggcaaagttgtccagcatagtaccttttcctctgtagctctttgtgggatggggatggttttgtaaactctgcaagagcagatgtttgtatccagctggagatgtctaggattgaagtggatgccagtagacgcttattggaactgtgtctggcacatagaagacagcataacatatttgtcagatgaatggatgtgtagtgagtaaatgagagaacaggagattgaataaatgaatgaaggataagccaatgaatgcaaaagaaagtgaaagcatgactaggaaatggtgaaagaatatgtgaattatgagtgaatgaatgaatggccatgatgcatgaatggccacagtcaagttgatgctacagaccacaataaacataggctgctactccaggctggccaactctgtctgagctagtgtgtgtggtcttcctggcagccctcctcagaatcctcattagaataacaattttctaccctattgttttgagtttggattatatggttgttaccatttgtcctccagtgattagaaaaactttgagatggttaaaaaaaagaaaaagagcttctccatttgtgaacccccaaatgaatatcattgcaactcaggccagatttccagaactggactgtcattatgtcaatctgatgttaatttaaatggtaattggatgagagttttcaaacagcctcccttactgggcaagtgagccttcctgctgggctgattttggaggaagagaagctggcaaggaagggaaaggaaggtattatggattcttttaggcctggagtgcacccattcatctatctgctccagtgggggtacagatagcagtttgatattgtagttttattccaattcagtggtttaagaaccagaggggcaataggaagaaaaaaatgaagtcttggcatttacagagtcaggcttaaggaccagctttaccattgactgactgtgtgattatgaacaagtgactgagcgaggtatctttggccagaccatgatgagtctcagcttcctcattgtgaaattggataatcacgtccactttacattgcagcatcactgtgagggtcaaatgagataaaagtgacatggcttcaccaactttagggtgtcataaataaaagagatcgcaatcttatgagtagccatccgaaaatatttggttagggtttgaacaaatctgtgagtgctatggtttgagtgaaagctcaagaaaaatgcaaacaaaacaaaacaaaacaaaacaaaacacaaccaaaaacacacaaaaaacaaaaaccttgaagctacatcatttgggcactggctcctcctgcttattatttttgatttgttcaatctgagccttcgttgggccagttttcatcgctccttgatcctattgctttttctcaagctaaaaagaaaggagagaagagtttattgtatgactgcccagcacaactgtctagcagctcaggccctatcatctttgtaccaacccacgtggttcttagaatgctgttgatcaccaggatgtcatgaattatgatggttcctgttctgccttcatgtggttcatggtaactgcagaggggtagagagggggtgctgacttactgtgagacttcatgggtgaggcactgggctaagcatttcacacgtgtggcctcctgtcctccctatgcaacagtccttgaggtccacattaatcttcccttgcagagaggaaggctcagagaagtcaaataatttgcccaagatcagacagagaaggagaggcacagtcagaattaaaatcctggtcttgctgaggcaaaactatgaaatagtcatgatgaggcaaatgttctctgttttttctgtggcctttgggctggatatatgcctatcttgggttgagtggataaacataggcatagaggaaggctgcctggatcatctttcctgcttctgagagtgtgagaggagcaatgagaagtgggagagacgttggtgccctatgataggtccaaggccagagagataaaaggaattgtgaatttgcacgcaaagaaggagctctgtgcaactagcagtaggtcaggaactggagctgtgagaggagccggggtctggtttagctaatggctaaaccagatgagaagagcgtgcaaggaaccccccacctgctgcccacagcaaagctaaggtgctatggacaagccgctctgtgctcttacttgttcccaatgaggggctactgtctctgtgccttaaaggcacttggcttctgaggactgaggctgatgagcagggttctccagagatgggggcatagggggtgccattgaggagcatcacgctttcccccgagatgtgtttccaaggttcttggggtcaagtgaagtgtgacacagcccccaaatcaggagctctgactcagggataaggtcttaagtgttctcatccgagacttgaaagcctcagcagggaattagcaaattcattcattaatggcccattgacatttctattataaagactaatcatttgtttttattgagagctttttccttgattaaagccattagcaccaatgagtaaccatcaatcaatcaacaagctttcttaaatgtccccaacttggtccgattgcagcctgaatacagtcaattttacctcctaactatctctccaagctgcccacttctctccctctctgttgctgccactctggtccaagccactgccgtttctcaccaggactacgctgatagcctcctgcctggctctcttggccaacaaggcctcgcctaggcccttttatttttctccccagcatcatatcctgccacgcccattctcccagtagccttttgcatcttcatactgtctactcctttctgcagattttcacatgttcagccttggcccatccttttcccagccttggcttcattagatcccactcactctttagctctcagctcaaatattctttctcagagaaaacttctatgaccccctgagactggatcaggcccacctgtgccctctctctcccagcactctgccttgctccttctggcactggcccgggttattttaggggtttgttcatttgattcttaggtttctccctggcatgcaagctctgcaggggcaaagagcactctattttatcttatcttggttttagggccaggacttggggaaggcaggcaagttgcctaaggagcatcatttgaggagaccttcactcccagacatgggccctgagcttgcagtagcccgagagtaggtcctccttaagtcttgttcccgcagcagcccagtggcctactcttgtcccacccctgcgaggctctccaacttaagaccaacacaaggaaggtacacgccataggtacttgttgagtgcatacattggaggcaggaagattaagaaaaggagctagtcaggaggctgcacccaaagaggaggggagagtggaagaggttagaccatgcagggatggcgaggaggctggagggagcagtgcagagagactccagtaggtagaaaagagaggatgcagcgatggtctgggtgtggtggaacgaggaaggggatgttctaggttggcaggttggtaatgcccattggccaggggagaaggaagtagaggggaggaggactggagcagtgggaggatgaagctgagcaggctatctattggctagttggctgggcagttcttcattgttcctaccacggcagccaccgactgggctttacctggacctctctggagggggtcaaggcctgccttggggctctcctctttctcagttaccgctaggctcatgtgcccactgaggccattgggaatctgagggcaggtgctccagggttttccaggactctgggagagggagcaaatcctggtccttaacaaggtccatcttcactgagaatgctgaacacgtttcatttctcttttaaattttaatttggttctgtcactgaaatcacattaggccccactctgctcttcaaaatgacatcttttaatgttccccagatatgcagatcaaacaggttccaaaaagcctcttcctctcccctgaccccgcttctccatggctcctcttccttcctctactttcttctaatcaggacatgcagtttggtttcccaaccaggctactgctagttcagataccctcctcacatgttggtgggactgaccatctgactgtggtattcagatgtgcagtccaggcactgtcctcatactagtggagggcagtcataccaccctgtggggacatggatagaatctcagccttccctttggctgcactgattgactctgtgactttaggcaagtcacttaccctctctaagttttggttaaaacatgacacttggactagaagatttgacagctttcccctagagtcatcgcttggaatctacacagtattggcccaggacacctcagggacatcaaaatctgtcgatgctcgaatctaatatggaataacattgtattttcatgtaacctacacatatcctcccatatactctaaattatctctagattgcttataataactaatacaatggaaatgctatgtaaatagttgttatattttttatttgtattgtttttattgagttgttatttttattatttttgaatattttaatctgaggttagttaattatgtagaacccatgggcatgtagagcccattgtattttcatttgagagtctttggatttttctgagagagagagagaattcatttagttcaagatggtccaaatccctcgctgcccactgacttcaagcctgcagcagccagtcagtatgctgggaacatccggggcctcatattacacactggagctaaacacaagatggggatcaagaaggagagacagagaaagagagagagctggaggggagagagagagagagattaaaagaataagatagcagagagagcaaagtggatgaaagagaaaggattctgatcatgttttctttgtccccatgatgctgagatgctgcagttagacatcttcttgagaattgattgaaaaacccaggatacttgaggagaaggctgtactcctctctgttccgcctggaacctgtgtgggcctggcggaggcagtggcattgagctgcattcaataaagaaattatttccatggcggtgtgaggccagctgcagcctatgctcagagcagggagtggtagttcatgccattctatcaggcagcacctctgggctcagtgctcatttgctgaagtgtgttgggggtggttctgccttgcatttgctgttagcacatgagagttggctgagcctggctccctggtatcagtcatgcacatgttctgagatgtgactatgctggaggtcactcacacacccaattcacacacccattttatgaggccagaatcaaggctgaagctaaaaccacatggatttggaaatcttaacagaagcacaattcattaattttatcattgtcttccctcactgaacaaattgaccaagcttgcaccattcatcatggcagttgacatccacacttcctcttttttcgatttgcactccagggtccttgccagtgaataactagctcgtggcatcaccaatcttctctgcctcctcccatgggccttcctctttgctgactggttactggttttaattttgagggtctcatgatgcctggagggcagtccctgataggagtggtgggggtaaagaagtaagcctgggatgagctactaaccagggcaggtgcttgtctgtgcacccactgggcgcccacagtggcagctgagggaggatgggtgatgccgttgtgggaagatggcaatggctttttaatagctgggggcacccctcattcatctgcacatgctgagtttattttgccatttgtcaaattctgactctaggggacctaggtttggagtggttcaggcttcaagattgatgacccgagtggaataacaagtcccccttctcctttaaataggtggcgctgccaagaggaagctccatggcccgctcatctgtgaaaggtccatttctctacctctgtagaggctggagatgaaatatttatttgggatctcaccaatatgccacagcctgcctccctgcccatgctagacagtgagaaagcttctaaatgagcatgaggcttaatggcttaacccaggttccactttgttaaagagaggaaaggaaaaaaaaaaggttccagtcctcctctatttggagaatggatattccttgggtaaaagcagctctttactgaggctcgtgttcctctagctgctgcagacaggcctcgaacacacacagactctagtaggacgctggaggactagggtgttgaatggaagcaagcccaattttcttaggcaggaagggacatttcttagaatctttaattcccaggggttataaaatcttaaaaatccacccagttcaagcccctaatccttaaaaccctgccagaacacgtctgtctataattgaatgcttccagtgatggcaaaatcaagacttcctgaagcagattattccttatatggaataatctattgcaagaatttcttaaataggattgaaatctgtctgtctgtagcttctacctacccggccaagactacccgggaaacacacagaatacattcattgctcttctccttaatgcctttcggtaaaaagacagtgatcttgtcctctttgaggcttctttcttccaaatcaagtcctcagtgggctctttcatgctaggcactggggatgtgaaaacaatggtgtccagtgagatatgaggtctgtgcctcagaaaacacactttcctttgccatgctggttgttgaggaggacatctgcccatgcctcttccaatgtttccgcccctctgcacattcccctcctaactcacccccaagagaggacagttgccactttatgatccaggacactcactgggccatgttttactaacgaggaagtcctctgtgggtgaagagtccacaacatctgtgtgatgtcccctttgctgtctggctgctgtgaagtgaggaggccaggcaggactggagtcctcagggaaggcccgactaggctttctctgttctaccccttctgtgcttgcagcccagtcaaccctattttgttgacccagctatcttggaatcgggagccagaggccccactctggctctcagcatgtatgtatgtgtgtgtgtgtgtgtgtgtgtgtgtgtgtgtgtgtgtgtgtgtgtgtgcagccatgctccagtgtgactgtcaagcacattaaggactcattcagctgtgaaaagatattcttgtttatcttgccagtcatctttgggaataacttcctagtttgaaactccacagtgcagagtagatattgaagggtaggattcaggaatttatgggtttatgacttaataccacctgtgtagcaccaaaccccatcctaatcttcagtttccctgtgccacttgaagtgtgacatgcagaattaaacgaaaacctaccttgaaaaataaagttgtgctccctgttaaaaaaaaaatcccatttgtcaattttggcttttgttgccattgcttttggtgttttagtcgtgaagtctttgcccatgcctatgtgctgaatggtattgcctaggttttcttctagggtttttatggttttaggtcttacgtttaagtctttaatccatcttgagttaatttttgtataaggtgtaaggaagggacccagtttcagctttctgcatatggctagccagttttcccaacaccatttattaaatagggaatcctttccccattgcttatttttgtcaggtttgtcaaagatcagatggttgtagatgtgtagttatttctgaggcctctgttctgttccattggtctatatctctgttttggtaccagtaccatgcagttttgattactgtagccataaaaaaggatgagttcgtgtcctttgcagggacccggatgaagctggaaaccatcattctcagtaaactaacacaagaacagaaaaccaaacaccacatgttctcactcataagtgggagttgaataatgagaacacacggacacgggggaggggaacatcacacaccggggcctgtcaggggtggggggctgggggagggatagcattaggagaaattcataatgtagatgatgggctgatgggtgcagcaaaccaccatggcacgtatatacctatgtaagaaacctgcatgtcctacacatgtaccccataacttaaagtatggtaataaaaaagaatcagagacatcagagaaagagggagcccatgccttgtctggcagagacagatggggaagtgttgttgcacccattggtgcccctcttccttgccccagagggagcggctaaggtgactcataaatgtgtgctgggtctcctctctatcttggctgttgatctatgggcaatgatgggaagcagcttagagaaaatgaactgaatgtgtttaaagaaataatgtcaagaggtacgcccattgaggctcatttgagggatgaaggatttgaccaaccccattcccaggcggcacaaagcttgtcagttctgtgaatttctgggagtttctggaactattgttaatgtaatgacagtggcttctaatgccagaaagggtgaaagtgagcaataggtaagaatgaagaagcagataaagattgctggatggataccagcatttcaggtctctatgtgtttggcagaaaatacagcaatagctattgaattaaaaacgtattactctttgatccagcaattcctttttaaagtatgtttttcacagatatactggtacatgtgggcaaatatggatgtgcagggatagtaattgtagcatttttggtaacatccaagacaggaagcaacttaaatttccatcagtagaggattggtcacataaaatatgattcatcaaaaagatggactaacatacaaacttgaaaaagaatgaggttcatctagtcgtgttgatgaaactatctttgagacatattaaggaaaaaaaaaactacagacagtgtggttccatttgtgcaaaataaaatggtccattcacagacacaagtgtctatatatgtttagactttttctggaaggatactcataaaactggtaatactgtttaccttaagttgggagtggtgatgagggaataaggaatggggagagaggaggctttctttttttcatatgccgtttcattatgtaaatgcattatcataagctgcgctatatttccaacaaaagtagttcataataaaaagaaagcatatgccttctgcacgtctgctagctgctgagcttctcattgccccagatatttattgaacacccattgtttgcaggatattctgttagcccactttggggaggaagtgggaaagctatggttcatgctttcaggaaatgtactgtccagatggagaaagaaatgtgtgcatgcagttattctacaagtctgagcagggaaaatggaatcttgattagggaactgatgaagattttatgaagatggcttgtaaaattttggtagtggaattttaagcctcacaaatggatgaacggggcacagaattccagttggagagaaaaacatgaactaaaggtatggagtggtaaatgaaaagccatgtggtgtcaccttaagtgtaccttctcatctacttatggtactaccagaaataccactttcttttgggttaaggtgttgtttgctttcaggagtctttgtgagaatacagatatctgcttttgattgagatataagagaatagattcagggagggtgctagtaagccagtccacccccctccaaaatagtttgaatttgtagcatttgcctatttccaaggggtaaatattgctcccatggctgacttcaagctaccaacacagaatgggagttgggacgggatgtgcataagggttcctttaagcccaaaagagctcactccagcctgccatgccacaggatgaattagaatcccagagtcttggaaataaaagtggcattaaagagagtttaacataaaccttagctacacatgaagaaattaatgtgtttgcacaacgtctgaggaagtggtagagttggaacattatcttctagttcttggtttagtgaagtttctacttttccttggaaagcactcatgtaatggagggaatggaacatggagcagtgtagttttggtagaacaaaaaaggtcatgaggagaagcaggagcctttctcagagagagcagggtggggtcctagaatagaataggtctttgtcaccaggaaggttctgtgagctggggagctggggagcaagagaaaggaccacagcagggaggagggggcacagtcaggagaggccttaggggaagggattggaagacaaaatttccagctgcacagttttgttcaggactaatatttcttcccaaaacagggatgtaatgagctgatctgaaatatgggaaagaaaaactgggcaagtcccatccatatccttgatgatctgtgtgcacttggggaagtcagttctcctctgtaagcgtcagagctttcctccttaaagtgggccccgggaaagggggctagtagatggcttccaagaaccttccagcgtgacagtctttgtggctgtgaatctggtttttcagtgaagaagtcccaacaaccattgcggtaaggagttgggtagaatgggtgcagcaagttgcattgacttattttttactttatacccagtttggggtagacaaagagaaatcagagcagcggaaggcaaaagtgaggtttgtttttcagtttatggtagggccaggaagtagaaaatggatcagggaagaacaggacagagaatcctctttgttatgtcatgcatttaaaaaatgtgacagcccatgctgttcttcagtggaaagccattgccttcagtgcaaggtccaggttcctttgcacggtcatagagctctccattttctgcccttgcctaccttcccagtctcctctcctgggtccctgactcctacctccctgtcacctaaccaacactaaccaagcacacgttgcttcctaacagcctgaaagtttgggggcgccagcctttggacagacctcgacttggaatgtttttcccaactgtatctgctgggcaaacttctattcattcttcaaaatcctgttctagcacttcaacatctttcttaagcctttcttacatgacagcctcttccctgacctgcctccagatggagaaaatcactcgcttcctgagcagctgcttctgtaggcatgccattttaatggcaatactgcaatttcattgcaagttctgtttttatctcccccatttccctgtgaacttctcaagggcaggaaacttctatcttggctcctgaggatgaaatgagctgaatggtgactggctcccagatgctggcagaataaagcagagaagactgctcctgtagcaacccccgtccccacagctccaccctgggaaagatagagtagggcatgccaggtgatgcaaagacttttataaaggctgactgggagtgctggtctgccaagttcctcaaaccgtttttagctgagcccctaagggaacttgagtgaagctctgggtgggcaggagggttgcaatgccatcgtagagtgaggtagttgacagtcctgcccatggcggctccatgctgtgctccagtagagtctctccaactctctggaaatgagggtctttcctgggatcccacacaaattcggccctctgctaagggctgatgcagatgctgtggtacatcactcagataccccttcaacacagagagacttaatcctaatgcctcttttttcctctcacaggtgctgatctccacaccaggatctaatcaactgtttgcatgctaatctccagcccagactcaacctatgaggatgtcagtctgctgctaagggctgctaagattagtggactggtcagagttggtatacccgggtgatgatctctagggacagtggtaggaactgagactaaaggcaggaaggtgatgtcagcagagcaaccaagagagtcacagggagaactgggatcaacagaggtcattagagtgccgcacagccctggccaccaagcatcagcctgccatggccatctgagatgcttttagctgtagtggggaggtggtggtgggagtgggtcacccttcagatatcacactgttgggggctcgcaccagcatggatgttgtgatgcatgttggcctcggtcatggccatacattagactcacttaaaaatactgattccaggaccatgccttgagagatactgatgtaattgatctgtggtaaggcctaggtcttggtatgttttaaatgttcactggggatttctaacatgcaactagaattgagaactaccggtatggtgaaaacatgatgagtgctggaatcagagttgggtttgaatctggtcctatcagtgactggggaactacaggctgtgattaattattctgagcttccatttcctcatctgtaaaaatcatgtaaataatgtgtatttcatagaaatgtcataagggtgacatgctactagtaataacactgatggtgataacagctttcagtccatggagctttttgtgatcaacattattactatttgtgttcagacttagctttttgtccttccttctccagggtgtagcaccctatggtagacttgccttccttagcccctactctactgtgagggagtcctctctccttgccctggtttcagctactcagggttcagcaaattggctgctgcagctcagtggaaaaccagtgactctcttggggttgaccagatgaccaaacattggcacccatgatcacactcttgttcatatccagaacaactcatgcagcagctcagcccttcaggatgacactggtcagtgtgtggctgctatgtggaaaaccaggcagggcaggggctgctcattcacaggggcagcaagaaggttcaggatgcttagaggacttcctcagaaatgtaccagttgctgtgtggctttggacaagtcctttttcctctctgtgcctcagtttcttgctctgtaaaacacagatggctgatctggacaaacaacaattctattcagtttgatgctgctggttctgccactccccttctaccccaggagatgccttggggggctggcatcatctctgccttcttccacagagactctgatgctacagggtggggctctgagaaatgccacttcagagcagggccctgagagtctgttctggtcactgcccacactggctttcctcactcctgcccccaagggttatacgtttccccatttctcctcctgccacctagaactttaaatagcctccagcacactatgtggctgccagaagttgtaattaaataatgtccagctgtcagaaaagctgttataaatggtccttttgtctgcaccactgtctgggaaaccaggaaggagagaaactagggggttataaatatgaagggcagaagttcagtggggagtccggggaaagcagcttttagggaccctgaaaacactggaggaattaaaagaaaaagtgtaattagtctatggcagaggccccagctctggctctgtgactggatttgcacattgggtagcctgaaaataatttgggaagctaatgtctttatctggagctgcaattaacatctccttttaaaatccagacaggaaagcaaaaagggcacaatgagtgctggcaatccagagaaagttctcggatcaactttcattatttttcacctccttttcttccttcctttagtccttccttcctctctttcaacaaacacacttgaatccctgcccttactagcccttctacctctagagttcctgcacttcaccttctacccccacagccacctttgttggtgccatacctgaccctgtctcctaggggcgggccaggatctcagtcctctctccatcaaaatatgcccaacctgggagccacttgcaccttctttttgtgctgcagaatctgtcagtggatctcttggagtgcccagagatttttcactaaatgaggaatagggagaggaaatgcacatttattaaccatgtattaagtattaaataatttacacacattattccacttaaatttcccaacactcctaggagaaaattattatgaagcccagtattgtaaatgaggaaactgaggctctttgagatgaaacaacttttccaagttacacagccagtaattaaaggactggagattagaaaactcagtctctaaactccatgagggcagaggctgtgtctgttttgtgcattgtcttgctagggcactgcatggtgcctggcacatagagaccttgagaaatattcagagaagaaagaaaggaaacagaagaaggagaaaaatggaaaacaactcagctctgtcagatgccaaagccagtgatctttctatcgtggcatatagtctctgtagagtacagacaggcagttatgaattagagagatgtacataatagttgggggaaagtgattgttaaaatgtgtgcaaaaataacatgattagaaagcagaagattggtttcaaggatcattggggaggtggagtgagagtgccgtgggggttcagaggatggagggattgattgcagctacaggaatgggcagacttcatgagggaggcagagtttgagcctcgaaggatgagtaggatttggacacagagagatggtggtcagggaaggttgagaaaacagaagggatggggagaaacataaattatctgtctggaaggggatagaccagtagttaggcatttgagtctccatggtgtccttgcgtggctattagggatgaatctggctgtgaagtcctccatctgggcattctgagacattcactgacagattctacaacacagaaaatgtgtgggtgactcccaggatgtgcatattttgctagggagaggacttagatcctggcctgcccctaggagacccggtcaggcgcagcgccaacaaaaatggctgtaggggtggaaggtgaagcgcagggactctggagagagaggggctagtaagggcaagggctttgacttcacttctgctcctcctgtgttcctcagcattcttcaacctgccactcagccaaccagggcacctgactagtgcccagggacaatgaagggttgttgaggctgttgttgaactatttgtttttgttgttgttgtttttgttgttttgctgtgctggacatgctctgagagcagcaggaacacagatcatggaagaaatagcccaatggtttgggggattattaaataatcatagccagggcactttacctttatggacaggctgcctggcagcatcctcaaaggccagatgggaactcatacgaccattttaagagacgtgaatgctcataatgagaaggtctgcagtagaatgattcaaggttactctataagagccctctgtaccaaaacgcaggagcccagtcatccctttctggggctgaggcaaactcttgaccaccacaaaactttggctgtttcgttggtggggagaccttaaagccagctttagagcaggtgttatagacacttctccacatgagggattccaggacaggatggataccaggcatgagtggggattctgaatgtaatatatttgccatcagggctaggcaggtgtcctgctacctggacaggcagccttgagcacatctctaaattcttctgggccctggttttctattcacaaacattgattcaagaagttccttgtgaggacctgctgtatgccaggtaggctctgggggcaggcagcaaacaaaagtccatgatctctgtcctcatggagcttctagtctagtggaaataagcaagtaatcacacaaatgcacacattattgcagtttgcaataaatgatatgatgggaaaaaacaaggtgctatgggagaaacttttagggaggggaataagggaagacctctttgaggaagcgacttatagctgatacctgaagggtaagttatctgagtcatattcagaggaagagctctttcaaaggccctgtggatgggaaaagatttgtatacttgaggagctgcagttaagcctgcatggccagaaacagtgatcaaggtgcaaaatggagtggcatgaggctggggtggaggacaagagaagggccagtgatgcatcagcccatcgatcagaaggattcgggacttacccccgtgattgttgggagaccatcgctcaattttaaacaggagtgtaatgattggattcacatgctaaaaataaaataaacaataagagatggaaaaacaacaaccaagcttcaaaaatacttgagcctctgtacaggggaaaacaaagatttgaacaagtattttcatgttgcagaatctaccccatgggaataatctgctagcagaacaaagaattatgtatgaaagtatccattatagttaaaaagaccaaaaccattctggctgctgtgtgaagggaataaacactaataagtcttgcctgcttcggaatcaaatgagagaaaactatgaaagggctttgtaagtggtaatatgggtacacgtttgagagggacccaaaatctccccatcctccaactctccatcctcccccaataaaatgctgattatcccaggagtttaaggctttaaatctattaaaggggaaatgtcccagggaggctcactctttgagctaagcaagacaaaggcagagcctcagccccaaagggactagaagcagtgattctcaaccctggctgtacactagagatacctggtatggagctagccttgaaaatggcccccaaagaaccttactcccttgtgtaccagcccttgtgtagtccctcctatactgaatatgactatcctatgtaaccaagaggacattgtggaaatgatggagtgtgactttcaaggctgggccataaaacacaccgtggctctgtctttctgtctctttcttggattatttgctgtggaaaaagccagcagccatgttgtcaggatgctcaatcaaccttgtggaggggtccatgtggcaagtaactgaggtctcctaacaacagccatatgaaagaaccttgtggaaagagatcttccagcctccagctgacatcttacctgcaacctcataggataccctgagcctaaactacctagctacaccattctctagcttcctgatccacagagatggtgagacaacacatacgttttgttttaagtcatttttttggagtaatttgctatatagtattagataaccaatgctcctggggagctttaaaaaatctatgcacaagtcatatccccagaaattctgattcatttggtctggggtgaagtctaggcgttggtatgtttaaaagccctcagatgactctaatgtgcatccaggattgagaaccactgcattagagaatcgagtgagtaagtcaacaaagcagggattaggtatagggtattgcctcaatttccagggctaaaacttggtttacgctgtgagttctactctgggataagtctaaagcctagtgtggatcagagcccagggtcacagtgggctgatagtcagttgtctcagtgtccacagtttctgtggatccctaaatttcccttaggacacagggaaggaaatcaagtggcctcattggagggaagaagagaggtccagagccagtcaggtaaatccactttccacagtccatagctttgacccatgaaccctccctgcagtcctccacctttggaatgcaggtgtgccggatgcccacttctccactgacggacagccctctaccttcctcccacccaccattgttttctgtccagaccacgttcctgtctctgaatgttctctttgtaacttatgagcaatgatgacagctgattctgaaaacctttgtctgtcctcaaatttccatgactaatgagacactgttcccatctctgcacaataactcagggggctcggctgtctctttgtactccctcatgttatcatcctgatgaaacctgcaataaagtaattaaagtgattagaaagggagtcctagcagatgaagatgctgaggagatggtcagatattgtgagctcacccaggtgatctcagccctgtgtgtcagggtaaggtgtctggtctcctggaactctcttgtgaatggatgctagtaccaacttgcatctgtggggtaccaatgatttcagaagcattttagacattttttttttagcacttgtaacatggtaggtgtagaagatacagaatttaataaaaccctcttcttgttctcaaggagcttttggcttagtagagacaaataagagataagataagactatgatgaatactttccttgggggctgagagagcacagaggagaagtac[151 bp omitted]gcctcagcctcccgagtagctgggactacaggcgcctgccac[137 bp omitted]ccccagcccagcctaggtagttttgaacaaaatgagatctgaggcattttgttgcctgagcaaagacagagaggggcatatgagagaaacagtaggtataatgtacagatataagagcatagggctttccagggaatcataagcaaccccttgtatgtctaaatatgttcctagaaaccatggctaaggggggtggcccagtggcaattggtgaaaagcaacctgcttaagttgaacaccagcctgtgcacaaaagggatccagtgcacaggaatcactaccttcaaaatacatccttcacccaaccaaacaccatatccagatcctactcatttcacagactatagaacccttcccttttgttgtactagcctagtgttttctccagtcccatccccagaaccagggctttgattttcattcttcttggctgcatgacccactgaaaccctggctcctcgctggtcttgtcctcttgtctcctgcttaggccatgttaaaactggcctccattacctttctgactctcacctgggcctcagtgccttctcttatgaactgcatccacaggcagtcttaacaccttcaagggttttatgggaccaggagttggaaggaggagggctgggaaggtagaaacccaaatgctcgatgggactcctggggggaaaatctagaaggggcagaggcatcaagagtagggcaccaaggatgcagaatgaaggaaataaagttgggggaatacagcgttaaaaactggttacataggtaaggggctcctggataccctacttcacgtcactgaccctacgataggagtcataattgtcaatgccttcatctagatgtagggctgggaataataatgtaaatgtcaagtggtcagtgaagcaatgcagggtgctggggccacagcaacctggaaagcccatggtccatctaattgtgaatgcagctactcagttccaacctgcagctgccatgtggaaatgcggtccagtgtaaccagacattgtaacttctcaagataagccaataatctgtattttaatggaaaatagttggcagttcaaataaaaacaaacgattaaaaaactgtacatagattagatgaaggcagtatggtttttgaatttcattctctacataaaaacaaacagagcaactagagaccaaagctcctaaacccatggacatttattaaatgtccatgcacattgggtaatgaggtaaagcacactgggtaatgaggtatccccatggaccctaaatataagcaggtgaggacaaaccactaaagaccacaagccctgcctggtctcagcatctatgtgagaggatgcagaggggggcagcaaggtatctgacagatctgagaaaaagagaatccccaagtagccagcatgtcctcactggaaagcacagggggcaatttgataacattaggtaaaactgggaaggggtctgcccactccattcgtgggtctgtggcaacgtctaaaaggatgaaacagtccagaccctataaatgtttaaaattgaccaaccaggagtaccccatccagagtccacatactgatgagaaactgcaaggtgtggaatc[131 bp omitted]ggccatgatgaaaccctgtctctactaaaaatacaaaaattacccaggcatggtggcacacacctgtaatcccagctactcaggggggctgaggcacgagaatcacttgaacctgggaggcggaggtcgccgtgagctgagatcgtagcactgtactccagcctgggtgacagagtcatataaaaactgggtagaggaagagagtcaggaaatctcagaagaaaagataccatattttagagtattgcacaaaagcaacaaaagaaggagctctgtgaagttagaaaagctaacctgaaccaggtctccttcacaaatcccaggaaaactatgattgcgttaaaataaacatcataaaaatattgagggcaaaacccacacaaaatcatcataagaacgaagagaataaggtacagacaacttctctatagacagtgaaagtataccagtaagatatgcccacgaaagagtataactataatgcactatattccaaaataactgaaaagacattaagaaaatgatgcaaggacaacacaaatgagaatgtaaaaaatactcaaagacttatggcaaatcacaggcaagaatgagaaacaaaagaaagaagtcacttcagaaatgaagaccaaactagaaggatcacaagagtaaattaatacaattgacccttgaacaacatgaggttgagctgcgtgggtccagtaatacgtagattttcttctgcctctgccacccctgagacagcaagacctcctcttcctcctcctccacagtctactcaacgtgaagacaacaagactgaagacttttataatggccaggtgtggcggctcatgcccataatcctagcactttgggaggcccaggtgggaggattgcttgggctcaggatttcgagaccagccttgggaacataatgagacctcgtctctacaaaaagtacaaaaattggctgggcatggtggcatatacatgtagtcccagctactcgggagactcagtgggaggatccctttgggaggatcgcttgagcccaggaggtcgaagctgctgtgagccatgatccctacactgccttccagcctgggcaaaaaagacttcatgatgattcacctccacttaatgaataggaaatatatttcctcttccttaggacttttttaacaaccttttctctagcttactttattataagagtacagtatataatgcatataacatacaaaccgtattcatcaactgttcatgttgtcagcaagtcttctggctaacagtagactattcctagttaagttttggggagtccattaaaaagtgggcaaaggacatgaacagacacttttcaaaagaagatatacacgtgaccaacaagcatatgaaaaaaagctcaacatctctgaccatcagagaaatgcaaatcaaagccgcaatgagataccatctcacaccagttagaatggctatgataagaagtcaaaaaataactgatgttggcaaggttgcagagacaaaggaacacttacgcaccgttggtgggagtgtaaactagctcaaccattgtggaaaacggtgtggtgattcctcaaagacctaaaaacagaactaccattcaacccagcaatcccattactgagtatatagccaaaagaatagaaatcgttctatcataaagacatgcacatgtatgttcactgaagcactagtaaccatagcaaatacatggaatcaacctaaatgcccatcaatagtagactggataaagaaaatgtgctacatatataccatggaatattatgtagccattaaaaaaatgagatcatgtcctttgcaggaacatggatggagctggaggccatcatccttagcaaactaacacaggaacagaaaaccaaataccacatgttcttacttataagtgggagctaaatgatgagaacacatggacacacagaggtgaacgctagacactgggcctgtcattgagtggaagtttggaggagggagaggatcaggaaa[137 bp omitted]atggtgaaaccccgtctaaaatacaaaaattagtggggcgtggtggtgtgtgcctgtagtcccagctacttgggaggctgagacaggagaatcgcttgaacttggaggcagaggttgcagtgagcgtagatcgtgccagtgcactccagcctgggtgacagagcaggatttttgtttgtttcaaaaaacaaaacaaaacaaaaacaaaaaaacccctaggtgacgaaataatctgtacaaaaaatctccatgacacaagtttacccacataacaaacctgcacatgtactcctgaacataaaagttaaaaaaacaatggcttagggagtcaaaaagtatatgcagatttccactacatgaggtgggggtggggcacagagaaacaataggtaagagaaacagaaggtaaaaaggagaaaatttttaaaaatcaaaaagaagtaagccggacagggtggtaagcactatagtccctgaggcagaaggcttgtcagtatccaagagttcaagaccagcctgggcaacattacgagacctcctctcaaaaaataaataaataaataataaataaataaaataaatagaacaaaaagacaaatggtatttgagagaaaatgaaaatactgaacagtggcatagaatatctattacataataatagaagtccctgaaaaagaaaaccaaagtaaggaaatggagcaaatactagacattataattcaaggctttcctgaaataatgatatagataataacaaatctaaatctgcatatagaaagaacacaaacacagtgtacctgaaaaattgtgcttgagtgaccaacaccaaaatatattctggtaaaattactgcactttaagaagaaaaaattatttaggcatctagccaaaaaaggaaatagcttataaaggaaaggaaaattaggttattaccagactttttgacaacaatgctttatgctagcaggaaacaaagtaatatttttaagatacttaaagaaagaaaatacaatgcaaggattttttatccagaaaaactgacttttatgtacaaaggacataggtaactcatcgatatacaagaactcaagacaatgagcacttcttgagggatttactagagaataagcttcagataagcaaaataaccaaagagccattgatagtaaaggtttggcagtgagcgttaaatgcatagccttatgaaactaagaccaaatgaaggttagaacggagagtaaggtatgcaatggctatctgatttgaaaatgtagatataatacaactacaaaagttcagaggacaatgtggagaatatatgcagatttttttctaattttttccagtagtcatatttgtggtggtagtatttatattgtctttctgagactgttgagtaggtaatgtgagataaaacaaatgattaatcataggatattctaatcttatctcctaagtactcaagaaaccaggacactcattttgaagggacagagatacagacatactaggaaagagatagagtaaaacctggtagttctgaattcaaattagaagtatcagtatgaatacagtgtataaattttctagctctgtttgctgaaaaggcctagaaataatgactgaactactagcagtgaacatccctggtacacagattttggtattgaagtaccatttcccactagagggaatcaggacttcttgagacatggcagatttcaggtctgaggccagaaatgcacaataagtctgggatatcttgtcatagtaaatagcaaagaaatcaccaaaaaccaccataatctaaaggatacaggtaccaactgaaaaagcatccactagccaaagatgagtccatttgagtatcaataagaataacaattaaaatgaattaaaatgcatcacacatattaatatttaaatacatgcattcataattacccaggccctcctacccccactgccgccatacaaatatatgtcagcttggagaatgagggagccagtcattatcttgaaatctggtaaataaaggggacggatcaagcatttattctgcctttcctgtatgaatgataggggaaatgtctctttatagaagcagttctactaataaattaaaaaacaaaccagactgaattaggatccaccatttatatctcctaacaaattattgaatctaggcactgagcatccatggctgctaacagcatgaaaggaaaatgaacattagttgcctcctgatgtaccacttgtggtctggccaaagtggtcaaacctgagtctgatcagacctctagacccagcagcccatttgcgggaaatacagatgacaagggaatgtgctgagctgcaccacaagtcagcaattagcaaaacccgggagaaatcaggtcagatgactcaggttcctcaacagataaattgtgaagaaaaataaagagaaaggaatgatagtgagactgcttttgcaaagatgatgacagtgagaaaaacctagcatggctgactccatcttgcttctaacctcacaatctggctgtcttcactcatgcctgggcataggccaggctatttagtttatagtttaaccttgaagcaaggatgataatagcccctctctaaaactgatcccttccctgtttggacactgaaactgcctttgtaagactaatgaaaggccacaggcttaggattctgaattaggggcctgaattctgctaaaatgtaggtatagtttctataaactcttgctgctcaggagttatgtggccagaggtcacaagatttgtggcttcctcaattgtttctatagataagatcaccattacagaactgaagattggtcatttgagatgtttttcagacttttgcattctggcaactgactgaacccacccagacttgtgactcatggctcaactggtcctgtggcctccacccagagaacgactcagcatatgaggaccgttttccacaccccaatgatttcatccccaaccaatcagcagcacccatttcctagccctctgtccaccaaattatccataaaaacccagcctttgagtctcagggagactgacttgagtgacagtgtcagtcctttcactcagctgctctgcattaattaaaccctttctttaccgcaataccacagtctcagtgacttggttattttctgtacgagggtgatagggaggggagcactaagaacctgctgggtgatcacaatagcaacctataaggaacatgcaatgccttaaaa[367 bp omitted]caagatcatagctcactgcaaccttgaactcttaggctcaagcaatcctcctgcctcagcctcccaaggagctgggaccacaacataccaacatttttaaatgggcaagactaaactatagtcactatgcacacttgagtgataaaactataaagaaaacacaaagaactgtttactataaacatcattatatagttaatgctatttcttttatattaaaatggaaagatttttttaaaacccacatatatatccaggctgaagaaaacatatctgtcaggccaccttgatcaataacacctccaggtttaagggccaggtgtggtggctcatgccggtaatcccagcactctgggaggctgaggtgggcagatcacttgaggtcaggagctcaagaccagcctgacagtgaaacctcgtctctactaaaaatacaaacattagctgggtgtggtggcacacacctgtagtcccagctacttgggaggctgaggcacaagaatcgcgtgaacccaggatgcggaggttgcagtgagccgagatcacaccactgcactccagcctgggtgagaccccatgccaaaaaaacaaaaacaaacccaaaaaacttccagatttaaattctgcatggaggatcaagctttggatatcatatggactcccaccttcctgttccctctggcctctagacatttgaagagattatccaatgactaggttgaagtcatgagagtaaactacaggcttttattaggcaaccaagaaagagctaagtaataaaatataacttgtccctgagtagaggtctccttgtatttgacatttctattttatttctaaccagaagccctctggggtcatacagagtctcagaaaatgtcatgagcaatgtatatttatgatgggggctccatagttttaggcaaattctactttaacgatacccaatatgcaaaatttcagggtaattgtgatattttcaccacaaaaagactcttccctttaaagaagggttcagcttcaagcttcctttaaatagtagcttggaggataaggtaagcatttgtttacagaacagtaattgcttcacaggatggagggaagtgtgagctgttcaatgattgtgcaagcccatgggacaacaaagcttcgttacatagacagtccaaggttgggagggccatgatgtgcataatgaagcaaagagttgaagaacatcaatcacttcacactctccaggaccaacttgcaaattttcttctttataagctggaatcttcacatagtaagacaaagcatgtgctaagaaaatcagttcagaatttctgaatcattttgttgaacacattgagctacccatttgtctcggtgattatttgaattagtcataaaagcagtttttgataccttggggtttcttaacatctgagtttccttcctatgtttcctctgtgatatgaatttttgtgagaagagactattcttcactataaaagctgaacaggacaattactcattttcccaggctcctttgtcgttagagagcaggcacatgaggcacatgacctggcccaaccaatcagaagcactcacttcagcctctggggttctggggtggagaaataatgatggcaggggaacctttttttttttttttttttgagacagggtcttgctctgttacacaggccagtggcacaatcatggctccctgcagcctcaactttctggtgctcaaaaaatcctcccacatcagcctcccaagtagctgggactataggcatttgccacaatgcccagctaatttttgtatttttagtagagaagaggtctcgctatgttgcccaggctggtctcaaaatcctgggctcaggtaatcttgcctccttggcctcccaaagtgctgggattccaggcatgagccatcacacccggccaatggtggggaattcttgcagtgctgtggcactgtgtcagccttgtgtgtgactttcaatttagacacctggctgataccatgatctaagtcaatgtcataataagccactcggagtgaaaggggacaaggcctcaaagaagatagtcttaaactgtcttaacttaaactggtcttaaaaagaaaataagaggaatattttcattttggacggggggaggagtgaaggctgggaagaagaaagaaaagactgtatggagtgaaacagtgtagggggaagggcctgtgagaattccctgagaggacttaagagcatgttaagaatagggatatcataggggttccatgcaaagttgttttaagtgctgtagtgtaaattacccccctctattccctgcttcttcagctccccaagatgtctaaagtgtactccatactcattggtgctttatttgagtggggtttcaggcatgttgaaatcaaggagaggctgagtttcacaaatgtgtcatctgaagtcagacagaggagagagaagaaaaaccagaagcccagagccaaaggagaactgaagacaattgatgaacactggacatttgtaaacatcttcgggaggggattctacagaataataaagatgattcaacatgttacaagaccttggctggcctctgcacccactctggagcaatggaggaagcatcggctccagtctgccaggcaaggacaaggcagagggtgatgaactcctgagatgcgagcgtgcatgcaagtcaaaggtgacctggtaaaggcaatgtggctttatagagcaggacgactgtattcggggaggctttaggcttcttatttttaaacagatattttgaggtataatttacatgccataaacttcaccccttgtaaatgcacagttcaatgatttttgcatagtgcaatcatcataatccagccttagaacatttccgtcccctcaaaatgctctcttgtgcccatttgcggtcaatccacatttccacccccagccttaggcaaacactgaccagctagctgtctctgtaaatttaccttttctagaaatgccatacacatgaaagtcttttggatctggcctcttttccttagcctgacgttttcgaggttggatgtagcatgtaccagtgcttcactctttttattgctggatactgttccattacatgtatacaccatgttttgtttattaaacagctgacaattggattatttccacattttgattattaagcatagtgctgttataaacaattgcatacaagtctttgtagacatatgttttcatttctcttgggtagatacctagaaattgctgggtcacatggtaactgtgtttaaacttccgaggaagtgccaaatttttatgtaaagtggcagtgccacttcacatttccaccagcaaagaaagagggttccaatttcttcatatcctcatcaacacgaagtatatcgttggtctttctgattagaaccattttagtagatgtgtagtgatatctcactgtagtttcaatctgcacttccctaatgactaatgatgtggaatatattttcatatacttattaactattcatgtattttctcgggtgaaatgtgtactcaaatcttttactcatttaaaaaagtaggtcgtttgttttcttgtaatcgagttataagagttcttcacatattctggatacaagtgctttatattactttcaaatatttatattatttgcaatatttttattacttgcaaatatttcttcccagtctgtggcttatgttttcctttctttctttttcttttcttttcttttttttaaaggcagggccttgctctgtcacccagactggaatggagtggtgtgatcacagctcactgtaggcttgacctcctgggcttgagtgatcctcccacttcagcctcccaagtagctgggactacaaccatgtgctaccatgcctggctaatttatttacttatatttttttgtagggatggggtctagctatgttgcctagtttggtcttgaattcctggactcaagtggtcctcccacctcagcctttcctgggattacaggaatgagccactgcactggactcattttcttaatgatgcctcttgaaaaacatttttaaaaggtttatatgaagtccaatttatcagttttttcttttatggactatcttttcagtgttatacctaagaagtctttgcctaatacaatgtcaaaaagattttctcccataaaaatatttcatagttttagttcttacatttaggtctatgttccagtttgaattgatttttgtgtatgctaaaatgtgagggtgtaagtttattgttttgtattgatggggcttcaggacatgctgccccaaaatatgacaccatgaacatttgagaaaacagcagaaggagaaggtcattctcacctccttccttctccttctcccatgaagcaggtcataaggacctcatttcagtggtgccctctctctacctggaagaaaggatgtttgttatctctgaagacacagagaagaatctgaataaatagaccttgcaaagttccccccagtttattattaatcattagattataccccttttgtccaatcatacttctgcacaactgtctacttttcatcaatcttatgcatagaaatttgggtcttcatttctgaagcctcctccgtcaaataaaacttacattaaataaatttgttatgctttttaaaatctgtccttattttgggtgactcaggcgtaaacacagcaatgagtgagaaaatatatttcttttcaacacctacagtatatcgatatccagtggtcccagcattgcttgttgaacaacccatacttcccccccaaattgatttagcacaaatagtatttgtcaaatattaattaaccaaaatgaaaggattaatttgggggctcctggttctgttccattgatctatatgtctattcttgtcattaccgtactttcttgatttctgtggatttatagtatgttttgaaattgcatagtttaagtcctccaactttgttcctctgttacagaatagttttggctatcttatatcctttaaattttcatataaattttacaatcagcttgttaattttctaaagaagcctgatgggaaattctttgggattgagttgaatttatagatctatttggagagaatattcagtcctttaattcatgagcatgaactgtatcttcatttattttgatactctttaatttatctcagcaatgttttatagttttcagtgattggcttttgcatgtcttttgttaaatttattcttaagtattttactctttttgatgacatcataaatggaatcattttcctaattttatttttggattattcattgctagcatatagacatacaatttattttgaaaagatgatcttatatcatgcgcctttgctaaatttgttcactagttatagtagtttctgggtttttttttctttcttggtagattccacaggctttctaaaggatcatgttttctgagaataaagacagtttttttttctctgtgtttcctatctgtgcactgctaatttctttttcttgccttattgcactggttagaacctccggtatgatgttaagtaggattaatggcagttgacattcttgcattttctctgattgtgggggaaacatttaatctttcatcattaacatcaggcaaatggcagggttttcatagatgtctttattccaaccaagaaagttccctactattcttagtttactggaaaaaattttgtcatcagcagtgtttggttttatgaaatgtttttttctgcacttattgtgattgtatggtttttgatatttcttctattaatatggtgtattacatgaattaaccaatcttgtattgctggagcatatgccactgtgtcacagtatataatccttcttatatgttgatgaattcagtttgctaatatttagaaaattttgcatctaagtttgtacaggatattggtctgcaggtttccttgcttgtgatgtctttgtccttgacatcagggtaatactggtcttataataggagttgggaagtatcctcgcctccatttccggagcttatgtaggattgggtattgtttcttctttaaaaatgtgatagaagtcaccagtaaaatcatctgggcctgaacttttttta[138 bp omitted]gcctca[226 bp omitted]tagagagaggcctattcagattttctatttttttttctcgaatcagtttggtaatctgtgttcatttgcttggacttaatctgcagaacctttgactctgtgctgtgcagctgcttatatctctgctcagtttcttaaaatattatttatattttagcctagctttctgggagccactcccattcctacccagcacttgcgctcaaacaagtgctttctgctcccaatcaagccagccccctctggcagtgaagctgttggttttcatgggcagcaaaaatgccctagactccctctgttcttacctgaaattcagaagtttatcataaataaactattctcaatttgttgtttgcctttggccaatttctggagctccaaaatggttgtttttgacagtattgtccagttttatagttgtttcagagaaaggatttatcaacttcttcactcccctacagccgaaagttctctcggtcttttaaaactgctgggtgtgtgacctgtcagctaagcttctccttgttttcaagttgtcattgtgcatttgaaagtcaaagagtaaaagctcttttgaaaaagtcaggactagaaatgatgccagggaatgtgtggttggtgcaatggaggggcgtagagtgggtaaccaagaggtcatagaaatagtgaggagtgagtcaggggtgcagagcagtggaggcaagaatgaaatgcatggtctactagaaaatacaaacacaaatggaaaggctgccttacatctcttaacatcaccaatctaacagccgccatttccatgaatagttcatcccaggctccctcccccggttgggatttccagttgcctggggagtgggcaagtgttagggtagtgtagggataggacaggttaggacaggaatgggactgcactggccgcagggaagggaatgcggtaggagccacgtgcactgggaactggatacagccttcatgtcagcctctggaagagagctactaagcagtgatcacagctcacccctagctgccctctagctcagccctaacttgaccataaataaccataaagacttggtcctaatacttaaaagtcgacggttggcaggttatagcctgcaggtcaaatccagctcatcacttgcttttgtaaataaagttttattgatactcagccacattcatttgtttacatacttctatggatgctttcctgctacatggacagcactgaggagttgtgacagacactgtttgacctataaggtctaaagtatttactaactggccctttgcagaaaacgttttccaacccctgttttaaatgaaaactacagtagccaaacctcctaaagcatgataatgtggatagaccataatacatgcaatcagaagacatgggctgggtgcagtggctcacacctagcactttgggaggccaaggcgtctgatcatttgaggtcaggagttcgagaccagcctggccaacatggcaaaaccctgtctctactaaaaatacaaaaaaaattaactgggcgtggtggcacaagtttgtaattccaaatacttgggaggctaaggcacaataattgcttgaacctgggaggcagatgttgcagtgagctgagatcatgccactgcactccagcctgggtgacagaacgagactctgtctctaaaataaaataaattaaaataaattaaaataaaatcagaagatatgggaacaagactgatctgctacataccagcagtggcactcagtacaagccattggttctctgtgggcacaaggtcactataaaatagggatcaggtggatcccctgagatcggaagttcaagaccagcctgaccaacatggagaaaccccatctctactaaaaatacaaaattagctgggcgtggcggctcatgcctgtaatcccagctactcgagaggctgaggcaggagaatcgcttgaactcaggaggcgcaggttgtggtgagccaagatcacaccattggactccagtctgggcaacaagagcgaaactccatctcaaaaaaaaaaaaaaaaaaatggggatcagatgatctattctgtcatttggagttgtggttcaaacaaaactactgtatgtgaaatcatgttgcaaactatgcagcaacaaacatatactattcctgtttgcagaacacccactttgacttcctaaaccacctatttagaccctctctgcttgtggacaactgtcaccttatgtacaccttttatgtggccaagtctgtgaagtaccatttccatagggacttttttccttgactggaagatggagtaggagaccatgtctaccacaccgctgaaagagatggatgggacgagggaactcttaagaaactgaacttaccccagccccgtggaagtaggcatgttgaccagtagcaaataaatggtgtgagaaagctatttttcttcccaagaacatccctggtggagaaaagcatcatctgaattttgatcttatgaattatttcttttctctttaagaatctgaacatagtaatccctgttacaatagcagggataatttagtggttgacatgaaactaaaatttgggtaagagttataacttagagtctggaatttccagcctctgtggctcatttctatagcaaagatacaagaatcctcaggccattagctaaatttgagagaaggtcactggccggctgaaatcagaatgttcaacgtggattatcaactaccacgctgaaagcatctgtaatcttcctgcaggacttctcagtgcgataggtttcaatctccaggtgcaggggaacagaagcatcatcttctcccacgtggagaagaaaagtagtgacgttctgtttataaaacactctcctacccatcctgttattgactatagaggctataggttcctacaggtaggaaccatgtcttttcatcccagtaccttgcacagacccagaatggactaggtgtgcaataaatgaatgaatcctctggaagggaaatctttgaacctagtcaaaagaacacaaatcagtagacctgtgtcaattcttggcgctgcctcttagtcgtggcatggtcttgaagaattcgctttacctcttagtacctcagttttcactcctgtaagatgaaacaataattatctgcctaagatatcatttggtagattaaatgagataatggatagaaaagtgttttataaactgaacgtcactatttttcacccccatcctgcctggcccttcctgctgcagacgctttgagcctgagaataacagctaaacaaatttatggtgtttgcagttggattagccacagaatgagctgtgatccctgtttattttctgcctgccttcgtgagtttaggtcctggtacatgagtgcccgggatccgggaaatgttgattacatgtagttgtctgcaattgaacggtagtgggggttgaggtgggtggccggacctgatggccagaaagattaaggctaaatgcatctgaagaaaagcagagccagagtctgtctctggtggcaagtgtgtcccaggtgacctgcctagagataccactaatcaggaggagaagccaagggggcctgtcaaagggggtgttcttatgaggataattgtttgttgaagtactgtcagaaacagatatgtcaggagatgggaactaaaacactacaggtatgagtgagtgatcagatcttataatgagaggggctaggccttctctaaggaaggctgagagatgagtgaggcttagcaagggagaggaaagcaatagacccagctgtgaaagtgtaaagcaggatctttcagagtcaggcctagaacactgggtgtgattagctagttctcttttagttgaaaattacagaaactgattctggatagcttcaagagagatacaaaagaggttagggagtcagttactgaaaggataactgatatatcttgtagaatcagaggactgagatacttgccaaggataaactagaatcagagatgaatcagtagggtgactatagcttacaataatctattttacacttcaaaatagctagaagagaataattcaaatgtttctagcataaagaaaagacaactagcctgggcgacagagcaagactcagtctcaaaaaaaaaaaaaaaaaaaagaaaagacaaatatttaaggcaatgaatatcccaagtatactgatttgatcttcactaattatatgaatgttttatattatcacatgtaccctgaaagcatgtacatctttatgcataataaaataaaataaaataaaataaaataaaataaaataaaataaaataaaactagaatcgggagttaggttactgtggagaaaccaggcatttgtcctctctgactcttgcctcctacgtctctttatgtttcctttatttttaatttttactgccaaatgccattttttggctaatcaggctgtggctgggctccattatatttcaattgctcatctggccactgctaccttcattagaatgtgaatacttgacggctgtttagtgggctgaatggagtccccagatatatcaggtcctaatccttggaaccttgaatgttactttatatgggaaagattttgcatatatgaataaattaaggatctcgagataaggaaattatcctggattggccctatgtgtcttagattccatcataagtgtccttataagagagaggcagagggagattacgcactcagaggagaggacaatgtgaggatggaggcagatactggagtgatgtggctacaagccaaggggtgctggcagctgccagaagttggaagaagcaaagaatgtatttttccctatagcccctggagggatatggtcctgtgagtcctgtgacaccttgacttcacccactgaaacaggcttcagacttctggcctccagaactgtgaaatactatatttctgttgtttaagccactaaatttgtggtaattgactatagaggctataggacactaataagagtaggggccatccgttttcatcccagtaccttgcatagatgcagaatggactaggtgtgcgataaatggttattgaatgaatggatcctctgtagggaaaactttgaacctagtcaaaagaacacagatcaggagacttgtgtcaattcttggtgctgcctcttagttatagcatggtcttgaagaatttacctcttaggacctcagttttcactcctgtaaaatgaaataataatatctgcccaagggtaccatttggtggattacatgagatgatgaataggaaactgttttataaacagaatgccactatttttctcctccatcctgcctggccctttctgccacagaccctttgaggttgagaataacagggaaactatcactgtatctatgtctaagccccagtgtagcaagatgaggaagagattgatggcttcctgagcttggtctcatcattatctccccagaaccagctgcttccttcctcccctctagccttagacatttttgccagtcagggattaagacctactctctggcagtcaagatctgcagccttgtgggctgtagctacctgctacctttcctgtatttttccattctctcttctctgtagcttctccatcaagatgtcattatcacctgtttgcttcttgtcctctgggtagcatacttttggcccaggtgcctcaagggacctcattcctgttcagcatacctgttgcaaatacctggacacaaatgttctcaaagcaaacccctctatcaacttcccagggaaatatagtgctccatgtgaattaatgttctaggtaactgaaaaccaccctttagtataaaaaaatcaggattgcttattctaatggaaaatttcctatacataaagcgttatagaccttcttatcctttgactcaggaatttcacacctgggttccaaagctacacaaaggattcacagaataattttcttttttcttttcttttttttttttaattgagacagagtctcactctgtcatccgggctgaagtgcagtggcacaatcttggctcactctaacctctgcttcccaggttcaagtgattctcctgcttcccaagtagatagggttacaggcatgtgccaccacaccaactaatttttgtatttttagtagagatggggtttcactatgttggccaggctggtctcaaactcctgacctcaagtgatcctcctgcctcagcctcccaaactgctgggattacaggcgtgatcccaccacacccggccatcacaaaataacttttattgcagcattactgaataagctcaaacttaaaaatggtagaaacatccaaaacaaaaggctagtttaataaattgtggcaagtaactatgtacctgttttgaagacactggaacttatgtttaggcacgctccgtatacatgcagaaaatacaacattaagtgaggaaccattgttgtaaaatggtagtatgcagacactattattttcttacccagaatgcattttcctcttctttctggttttatttaggtataacctccctcatgggaggtgagcctactttcagtaaagcctgacttgcctgagcctgtcatggttgttctctttccacttttcactgattggtttaggggtggtcatgtaatccagtggtggccgatggctaactgaggggaagtcttattctgggggattctgggatacttttctctgttcctgaaagaggtgcacagaaagatgaaaaaattctggagatggatggtggtgatggttgcacaacaataaacaatatgagtgtacttaatactattgaactgtagagttaaattagttgagatagtaaattttatgtcatatattttgttacaataaaaccttgtaatcaagagggatgcacagaaagagactgcctccatgactttgtcttcctctgtggcaggggtggggagtaattgtgtctagatgtggaaataattatgtactgatataatgtacccctcagtcatcactgtccctgggcaatctcatcagctttcacagtttctgtacatctgtatgcagatgtatatgtatacagggactgccacacagccttctgggcagagctccatgccaacatatccaactgctatcctgacatgttctcttagctgtcttaccatagggatctcaaaattaatatgctccaaatgtatatttttgtattttggaaaactcaaacttgtagaaaatttgtcagaggcgtacatgtacttttttttttttctgagatggagtctcactctgtcgcccaggctggagtgcagtggtgcagtctcagctcactgcaacctctgcctcctgagatcatgggattctcctgcttcagccacccgagtagctgggattacaggcacccaccactacacctggctaatttttgtatttttacaaagttttgtatttttcatgttgcccaggctggtctctaactcctgacctcaaatgatctgcctgtctcggcctcccaaagtgctgggatttacaggcatgagctaccgtacccggctgtacaatgaactcttgaatacctttctcaatgactcaccagttaactttttgccttaacacgccaaaagtttgaccttctatgaccccttcctccctgaaatcctcttttccaggctccccatctcagtagtcagcgctgttacaaacctgttgcttttgccagacaccggaagttgttcttgatgtctccatcttcctcttcccgtgacacaaaaccaactatccagtcctgtgaattatatttcttttttcaaccattgcagttgccttctcactacatcccttatgccctctctttcatccacttttattcagaataactagttataagtttgaaacacacccaatcatatcagtccttgcttaacatcctcagtggcatatcctcaatggtgtattggcttctctccttagtctctttcatcaggacctgacctagtttgttctataccccatagcaccctacgtttttccttgtttgtacttttcataattataaccgctaagtaatttgtgtgcacatttgttgactactattctcccttatatgtctatgatggtagggactttgatggtatttctcattgctgtatcctcagaacctattctcagttagttacatgatatgcacgcagtacacattcaccagataagtaaatacatgaatgaattaatgcatcacctccactgagcagattttaatctgctgtgaaatgaaaacttggaataccaagttagagctgcatgtaaattaaaagcaaaaaagcactgactgccaacctaaggtgagtatctgcctgttagtattcggattgtctaccttctacctgcttagaggtggtggagactaaaggaaggaacctaaacttggctgtcatgcagatcttgatgctggctctggccctggccttggttgctcttggcctctttgaacctcagtttccaaatctgcaagatgggtatggtaatatctatctcaaagggcttttgggaggcttaaatcagatagctttggctttctttccatcacctctttgcctggcagcatagtcaggagtgcttaggcctcatgcctccaccttcccctaaaatttgacctgcttgaaagcaatggaaaagggaagcttattatcacagcctcagtcttgcctttgagtagcagctgagaggtagttgttagtgggtagacagtcactgtttctcatgtgcttcctgggcccacgacatagtctgacgacagaatgggaacaaagtggactttttagtgctttgcataatgatgccatgcacgacctctattctgtgccaatgatggtggagttaggatttagatgctactgtctctaaagattgatgttttctttgtttggaacagagtggggtgtgtgtgtgtgtgtgtgtgtgtgtgtgtgtgtgtgtgatagcctttaaaaagcaaggaagaaacaaaggtttatgtgcagggtgtacttgtcaggggctcagtcttgcagggctggaacccagctgaaacttttgtcaaagccatcaggctctttgttaatgaagctcctccgaatcaaactgctctacatgccagtatttagcacaagaaaggtaaagactcatgaaatgacagggccttagtgtttttccgcacaggcactgagattcctttcgaatgaatgttgttagcaccctttcaaacagcctctccgaaggttgctaacttatgcctatgagttctgccttccttccttgctgaatatcacatggtcttcccttcctcctctgcaattctcacagtatgtgtacatgtttgtggggtctgagattatatttgtgtattagagaaagcctgtgtttttggatgtattggggagctggggtatgggtgcttcccagaccatggctggggacactcctcttcctttctacaaagcaggtgaaaaaaaaaaaaaaaaagaaactgattttacattctgagtctatggtcttacttttccataatcttttatacgttgggaaatattcctctcctacatatttttctaagggagggtgatggactctagagccagaaacctcttacagatgggggaagctttttgaaaagaggcagggaggccatgaagggatgtgaagcggaagatgttctcagaggaaaagagggcagagtgtgtacctgcaagaacaccctcaactcccatgaaggttttacaattttatattttccccttggtttatgaggacaatcatagattatgtatggttttaaaaatcagctttattgaggaataattgttttataattagctgtgtatttttaagggtacgacttaatatgtttgacctatctacatacctgtgggaccagcgccacaatcaaaataatatccatcatctccccaaatttactttgtttctttgctcctttgtaattcatctctctccccatgccatacccagacagccaccgatctgcttcctgtcactgtggattagtttgcattttctagaattttatataaatggcatcatacagtgtatgctttttttggtctgtcttctttcactcgaggtaattattctgaagttcatttatattgctgcatgaatcaataggtcattccttttatttttcctatatggttgtaacatagtttgtttacccattcacctgttggacatttttgttatttactgttgttggctattccaaagaaatctgtgatgtgcatttgcctacaagtgctcatatgctgaagtatacagtcttaagcatttccttttctctcatggtgacatttcttttacttgtccccagcctctgtaaagaccaacacagccatccagtcttacacagtggtgttgtgggaagtaaagagacaggaagaggcagtgtggcctgccccttgttcactgtccactatgttgatctgtgtggtgaccagtagtacagtggacggtggtctatagcagaaccagaaatagcccagagaagcagttacaccaaggactcaactcagaaacagctatgaggcaaagaccctttactcccagacagactttgtggaggcaggctgacatttgagatgcacataaaacatcatgcccattgtaggcacccagtacttccaaattccctttctgctatgtgtactttcttaactgctttgtttgtaagttctaggttatcttcttaacaattgtggtttgtaggcaaataacctttggctaagagaggctttattctgttattctttaaaaatcttagacagcacataaatatagcaattgtctcagtccattcctgctgctataacaacataccttaggctgcataatttatacacaatagaaatgtgttgcccacagttctggaggctgagaattccaagatcaaggcaccagcagatttggtgtctggtgagggatctcagcttccaagatggctctgtgttattgtttcctcacatggtggaaggaacagaggggcaaaagcagggctcaggcactccctgcaacctcttttctaaaagcactaatcccattcactaaggtggtagtgctcatgacttaatcacttccttaaaggtctcaccttctaatactatctaattgggtattgaattccaacatacgaattttggaggaacacatacattcaaacaatagcagcgatatacacagatcctgtgtctgaggtgtcccgaggtatccctctaactcataagccctctttggagaggaggcttttgttgtatacaggtatcctaatgtgtcttacaggatagcactgtgccacctttatttttttctttataattgtgtaatttattattattttgtcatttttccaacttttattttagactcagggagcacatttgcaggtttcttacctggttatattgcatgatgctgaaatttggggtgtgaatgatcccctcacccaggttctgcatagtatccaatagttagtttttcaacccttgcactcctccctttctctccctccagtagtcccgtgtctattgttccagtctttacatccatgagtgcccaacatttagctcccacttataaaggagaacatgcaatatttggcttactgtttctttgttaatttacctgggataataacctccagctgcatccacgttgctgcaaaggacatgattttgctatctttttatggctgcataatattccatggtgaatatgcaacacatttactttatccagttccatcattgatgggcacctagtgtgcacctttttagatatgttatcagcactgcttccaaatagcttctttgatggttgctaacttatgcctgtgagttttcttcatcatcaatttcagaactatcccaaaggctaaagaacagtgaaatacaggtaaatggggtttcatttacatctcaaaagccccagatagccgggaatatctgaaggactgactagatgatgtcctgatgatgtccctacttgcatataattgcttagaactatgcgaatcaaagactttgcacagttccttatcaccgactgacagagcaggagggggctttacaggccgtgttgtccaatggtgtcatttttaagaggagccaggacagctcagagaggtgaggtgccccacccagagtcacagagtttgttagcagctaagctggatgaggaactcagccctccaggcttccggtccagggctctctatcccaactccccccaacccccagctctcatttagtttttctgcgcttaatatgttttccttgaattgatttttctcctctgcctcatccattaccttgaaggttatttttggtgctcttctctgcttctttcattttgcagattgatttcccaggctttgctgagtttggtggcacttcccaccccagggtctttggcttcattattgttctgtttcctaccccctttattgtcttcctggggcttataaaacagaccagcccccaatatctcttagcctatcttccctccccacttcctcccaaatagcccccaggatgctgctatttcccatcatgcactatccccatccccccttcagtctattcccagattgcaaaatctgctcataatgacaaccctcggagctcatccttcagtgataattcaaggctgcaccagctactgggtagtgactactgatacatctttctgatggcatgtcttttctccactgggttttcattgtgtggagatgtgtctatttggaatgattccttctcttttaactatgtggtgggtggggcatctgccaggtgcttagcaggtgatggttgctagagtaaggagcgtttgttgtgtgtggagaaggtaagagctggagtgagcaccattcagggcaccagagttatagttccagcactggagtattgtagaaaaacggagagggctttagatagagtcagacaaacgtcctttcaaagcccagccttagcattgattgactttgtgatataaacaggcctgagttgcctcatctgtaaaatggggatagtacgagtactcaacaactgtcagattgaaaggcagtcctaaatgtggcaaagtgtctaaattgcttagctcagagccagatactttcttctggagtcagaagaggatgggcttcaatcctgggctccctgcatagtagctgtaatcctgcacaagctaattaatttctttaagcttcagttttcttaactgtaatatgagaagaatgaatcatatctaataaattggcttgatgattattacacaggagtatataaagtacttagcacagtgcctggcatgaagtaagaacttaataaatgttagctatttttaggtgttcaataaatgttactttcttttcctttgtaaatttagccttttttgtttttcttttttttttttttacaaaagatgaatgtacatcttgagaatcctatgaactttgagaagtttgagaagttaagcattcatcaaatacttttctaagtattgagtctatttactgagtgtatgatctgtagagagaaatatcaacttctgtggagctcaaaacctaattgggtggcaagcgactaggcaaatgatttcaagacaatttatcaccagagccaaaataataaattgccaattgaacaactgcttcaacaattcaattctatatccacttattaagaacatactaaaggccaggcataaaaatgaacaagacaaagtccctgccctctaggagtttagtctataaaggtagtagtattagtatacactaatgatgctgctgctgctgctgctgatgatgatgatggcaatggtggtggtggtgacgtcaacacctcaacactaatagctaagatgtatagacagcttactacaagacaggtgctggccaagggctttgcatgcattgtcttatttaattcttactggagccttttgagatcagtcatgttattctcttatggatgaagaaaaggaggctcagagagttaagcaatttgctcaatgccacataattcctggcagcagagttagatctcatactcaggtctgattctggtcaaagaccttgcacccagctgctacactgcactacccttccatttccagttacaatggaggaaataatcacataaatgctgtggtagaggaacaaagtgctgtgggggaaggggattctgattctgacaggggtgattgctgaagtcgtcatagctgaggcgtctttggggctaggtcttaaggataagtagtagatcaatggcaggttatggagtggaaggggttccagacggaggaaacagcctgatagatagaaagaagcctcgaatctctaggtgtggttggggaacaagaaactaagaaactaagaggtgtggtaggaggagagaggtcttgccaagagctttagagtcaagagaggtcagagtagattgaggatcattggaggatgaacttgtgagatgcagcacaaaggctagggagcctcatactacttgtttgggtaactcaagtaatttattccaggatctgtagggaaagatttttaaaacttttatgtttggagttttttcacatgtttgactggggagccaggagagttgggttttagtgaaaggccagaaccataatgggctctgaagttggaccgttgggtttgaatcccatctctatcactttctgactgtatgattttggccatagttaacacctctgtgcctcagtttcctcctctgcataatgggttgttgggagctgcaaatagatgaatgtttataaagcagttagaacagtccctagcacaaaacaagcactcataaaatgattattggtcatggttcaagtactggttggccatatgactttctctatctgggcttcagaatcctaatctattaatgaagagattgaataataatttctatgatctcttccagtctaaaatggtccaaatgacttctttggtgaggaagtataagaacataatatctttaattttcttttccttcatttctagtaaaatgaagaactagagtaattcaggggtgccaagctatgctgcacagggtttctgtccgactgaaccttcttggagctgataatattatcaagactgatggtctcattactggaaaacctccacgttgtcaatagatatagacaacggggctcttctggttgaaatactaaaacaaactgtcaattctggtgaccgcattaccttcgtttttttgttttttgtgttttctgttttttttaatgacccagaggccccaccattactcaagagttttgatcatcgtcacatggtttcgtctgtgctaagtctgttgcctgcttggctagccatgggggcagcagtgagtgattcatcacctgctacctgtccacgacggggtcggtctgtgctcttgctgagtatctggcctgtttgtcaggctgtgtggttgccgagtactgtgttcaaggcacatcttgtccctgagaggctgcctcccaggagacgcgtgcaggatcaatgtatctaattcatccaatggatatttacctcattaaacagcaatacattcaaacagaaaaatgaaaccacacacatcattaaagctaaatacgtttcctttctttgtcttagttttattttctgaagggaaatgcaagtagctctgcataacgagaggctcattgctggagcagggcgagaagctgaaagcatcgaggcaaagagagataaaaggatattggctcccagcaatatccctccttgcaggaagtaagcggtggtgaattcatatttctacatattaagctgttctgtcggggtgggaacaccccttcgtcagtgcaggggagaatgttggcagggctggccgtgcctgtggggatgaggtatctgtccctgccagcccaggagcagcagctggccctccagtgtggtctctctaggtggtttccccttgccctttccaggctgagctcagaccacattgtggggcaattgccagaagtgattgtctctagtgaatggagcgcctcttctttagagtgttaaggatattaattaggtggcaccaagttcatttagtccttggtttgtagttaaatctgttatgaccccataatcttcttgggattgtgaaatggttaaaaaaaaaacccagacttttcactctctttcaggattttactcagatttgtgtgtttgacaaactagctagtagtttatgctctatagcagacatttttgcttgcctccaacacatctatttcttcctttatcctgacctcggtgtccagatttgctttggaggaacaatctcctgctaggattagcttcgggtattgaccccactcttaattctagggatgggttagattggcttgagctgattagtatgtcctgtttccaggcatgtgacacaatttgagcaaatgagacacaaggtgccaagaaggggatggggtggatgggctgccattctcacaggcaggagctggtagatggcatacaaggaagctgggaggtgggaattagtgcggccctttatttgtatcctgaggatgagggacatcctgaggatgagcctggcacacaaaggaggccagaatagagagaacaagggctggctctgccatgacaaagtgaacttctggaagaagccgtaagtgaggccagtttctctctgggttgcaaagggaagtttgcataatcctatccaccacagaaatggggaaaactaatggccaaagattatttagtctcatcaacaaaggaatgctttctgtttcaaaatgacagattctgtaggagctaatatttacagagagcatgtgtcaggcatgagcttatatgttatgacttgtttaagccctcagatgacccagtgaggtgcatactgttataaatccattttacaggtgagaaaactgagccacagagagattaagtaattttctaagtcacagaataagttaagtggcagagccaggattcaatctgacatcagatttctcaccatcctgtgcaactgtagtattctacaactctacgatttccagaaacagagccaatgactcttcccactgggaactatcaaccatccagccaatttcattgcccagagcttttcagcttttctcaattccatctcctttgcccagatgataatagtctgttgcagtcacaaatcatctcgcctcctcctccacatctgacactctggtttctgtaatgtgcatctccctagctctatataagaaatgtaaccaacccacttccacctgctcctcagcacctgcttttctacaatagtctcaaatgcaaagttcacccacccaaggaagcactcagtgggattagattttgaaggaatgaacacttaacattcctttacgtttagataaaagttttgaaaccttattcaccctgtgacatactggtcttgcccaggtcctgggggagcgcagagctgtggaatgttttcccattgcccttctctatcctctggtcaattctatcatgcaggcacattcttgggcatattctccaaattctccatgcagggagccctccagatcttcacactcaatctccttacactttgatattccccagggccctgcttcttggtgctgtccaagctctacttgctgtgtgatatggtggaaagatttgagatgggagctgcctggcatgatcaggggcacttagagagcaatgaaaaagggcgcataatgacaagcagtgaacaagtcatcatagcatcaatgttctaagagggtcctgactgatacctaagctttccaaatgctaccactctagaatctcttgttaagtacatgagaagggtgtgtttatgtatctacaggggtaatacccaccccctccacagccattctctaccccttccacatcaagcagtcattggcttatctgtttgaataagcacacacacatgactagatattaaagggtaatttttataaatcaaatcagaaaaccttgaggctgtaccaggtatgccccagttccattcactttgcaactgaaccatctattgatccatccgcctagccattcatctaacaaaactttattgagtacctacatgtgccactgtgtcaggcactggggatacaaagatgaaaaaacacgtatttgcttcccctggagcttgtactttagtggaagagagaccgcgtatttcatgatattcaggtaagcattttgacagagttaatcacagggtgtcacagaagcagagaagaggggccaggctttgggaaccagaaaagccttcctagcaaaggtgacaattgggattaactgctgtgaatcactgtggcagatactaattactccctggtacctgtcctctttcttccttctggtaatagaacctacaaggttttagctgggcccagtgaccaaagatccattttccagcctcttttacatctagatgtagccatgggactaaattctagtcaaaacaggatatgagtggaagagatgtttgattatatttttcacaaaggtattttgttctctgcttccttgttcctatgtggataaggtggaggtgatctgactctgactatgtggataataccctaggggatgaaagagacgtaagatacaaggaaatggggccccaggatgactctgtggagcagaggcacctaccagccctagaccttccacccatgtctcactgcagctgccgtatgtgggtgccactttgtaacagcagcttaacctgtacctttacaaaatagctgaccaccttcaggctcatatttgctgagaaatacaatcagataagatattacagtgtcccctcccttttggtaagtatgatctataagtagttggtggtcaccctactttgatattcagaaggatctggaggtaaatgaaacattgaattctggtgagaactttgagccccagtgaatgcccatatgatatgtagttagtgtttccctgctaggccttctattaggtttctactttgcggctagatgtttggagacagagtcatttatagtgatgagagaggtgatggagctttgttctcagcctatgatttgggccacctgtccctcccacttacttcctgcggatctcttccccttgggcttgccactgcccttggtaaagctatatatcatcttctccaattcaaagatacattcctgttcttatttctgagattttctaagacgcagtactcttgaagttgtatcccactcactccttttgaattatagtctcagattgtggatcctttctaatggcatcttcatttggtacatatttttagagcctgccattggtcccagtattaccctcagtcctcctgttcaacttaaaccaatggagtaggttagtttgacccagtatctgtctttctgcattggttctcactcagtgctctgttggcatcatccccagaggaagtttctggcgtgctttatagttggagctatataactgtcttaatgcatcatgatgattctccttctccttcttcttcctctttgtcacatgaccaagatcacatctaaaaactactctttggactaaatattagagaatgaagactgccaaggacttcactaccctccaatatttccaatgtctgtcagtcagtgaattagaaggcagttggctgtgtctcccccagaatatatctacaggcaatggggcaggtaaggtagcatctccaggggattccctactccatgcaatctgcctgcgtgagccccagcccttatggaccaaaaaggaaacaactgcgggagtcatgggaaatcatctgtggaactagatagactctcagactcctgccctcctatgattagtgtccctaagtcctggatggcctggggctcccagcccagtcgatctctctctcctctgcccccagctgcagtgcatgcctctgtgataccactgctcatactgtactgttttatttgagaatgtgtctctccctccttcaaagtgaattatgtatcttcatgtctccagaaactagtacagcacctggcacataggaggggcttgggaagggtttgtaacatgaatgaatcctcagaaagctcagctgacacattggttgcatacccttatgagtggcatctgaacacctaatcacaaaacaatccagttttgaaattctggatgcatgtggcattccattattcatcttcacatatcacaccacagcatgtgtggtccactgccctgttgcctgtcattgctcattttcccagtcctaagagtctgagacctgcctttcctctttgtatcctttgtttgccaacaggtctttagctagctcttgaccctgcctgctcagtggcttctggtttcttagctgaggtgctccctatttctggctggattctatgaagcctctcactagtcccaggctcccttggttggagggagtgtgcagggatttggataatatagtgtgtgaaccaaattggaaagctggttgactggcatttgaggaagacatcagaataagaaatttcaattaaaagacactcctccttaattccagacttctacatcattctacacatgcctctttttctctttctttctttctttcttttctctctttctttctttctttctttctttctttctttctttctttctttctttctttctttctctttctttctttctttctttcttttctctctttctctctttatctctttctttctctctttcttcctttcttttttctttcctttttcttttctttttatttcttcctttcttccttctctctctctccctctctctctctctctctatatatatatatatatgtatatatatgtatataacattatcaaataagtgcctggaaattaaccctcctactgagctcattacctggatacctggaactttatactgaatgctcagacagccccataagcatttggacaaatctcaccatagcatctctaggcccccctgagtcataggagtccttgactcaggacttttcacagtttacaagtaccaacaaggcacttttttttctgcttaggaagaacattttccctttaaatgttttgtttgccttcaagtccatttgaatacaaaaatactatggaattccattaagataatgtctggggcataagacaccaggataaaaggcaggaaattgctctattctttatgcagagctccaggaggagctgacagttcctggataacttcaggaagcagactgttaagaaaatgagtgggccatatttcatgctggcttctagcttcccctggctgtttttgttaggagcttaagggattgttagagcaataatacaccaggctggtttctaatgctttcctccaaatgctgaagtttcctaattgttcaacaggaaaattgttccttgggctgaaaatacattcttaagtcccttcaggtaagttagtgaaatgagtagaagatctttgagtgtgggccttttttttctttttcttttttttttttttttttgagatggagtctcactctgtctcccaggctggagtacagtggcatgatcttggctcactacaacctccgcctgccgggttcaagccgattctcctgcctcagcctccctagtagctgggattacaggcgcatgccaccacacccaggtgaattttgtatttttagtagatacagagtttcaccatgttggccaggctggtcttgaactcctgacctcgggtgatccacccaccttggcctcccaaagtgttgggattacagacatgagccaccacgcctggcctgagtgtgggctttgatgataggtaacttattcagaacaggaaaggtctgccccttttccttgaagaatgaatgatttggaatctggagaggggaagagattaatgcctagccacacagggagattcctgatttttggtcctccagctttctcccatcttttgtgcccaacttatgtggagatgtgtagaaaagttctctaccagagtatttttcttggtagctgttggattcaagtcttaaaaactgtaaggaccagcttgagaaagtttcctcaggataaagccagagagagtgtagtcagacttagaaaagaacttcttgatatcagggcactgggattctgggatgggagatttaagtaggatatggattatttgcactaactggattgtatttttaaaagaatgcttaaaaatattttttaaaattaaaatctccttaagctgataagcaacttcagcaaagtctcaggatacaaaatcagtgtgcaaaaatcacaagcattcttatacaccaataacagacaaacagagagccaaatcatgagtgaactcccattcgcaattgctacaaaggaaataaaatacctaggaatccaacttaacaaggtatgtgaaggacctcttcaaggagaactacaaaccactgctcaacgaaataaaaaaggacacaaacaaatggaagaacattccatgctcatggattggaagaatcaatgtagtgaaaatggccatactgcccaaggtaatttatagattcgatgccatccccgtcaagccaccaatgactttctccacagaattgggaaaaaaaaacctactttcaagttcatatggaaccaaaaaagagcccacactgccaagacaatcttatggaaaaagaacaaagctggaggcatcacactacctgacttgaaactatactacaaggctacagtaaccaaaacagcatggtactggtaccaaaacagagatatagaccaatggaacaaaacagaggcctcagaaataacgccacacatctacaatgatctgatctttgacaaacctgacaagaataagaaatggggaaaggattccccatttaataaatggttctgagaaaaggctagccatgtgtagaaagctgaaactggatcccttccttacaccttatacaaaaattaattcatgatggattaaagacataaatgttagacctaaaaccataaaaaccctagaagaaaacctaggcaataccattcaagacataggcatgggcaaggacttcatgactaaaacacaaaaagcaatggcaacaaaatccaaaatagacaaatgggatctgattaaactaaagtgcttctgcacggcaaaagaaactaccatcagagtgaacaggcaacctacagaatgggagaaaatttttgcaatctacctatctgacaaagggtagattgtatttttagtagatacagggttttgccatgttgaccaggctggtctcaaactcctgagctcaagcgatttgcctgcctctgcctcccaaagtgttgggattacaggcataagccactgtgcctggccttgaaaatatttttttttaagtttaaaaatatgggtgaattcagagacaattatcaaagtgaagaaatatgaagtttattttctcaaaggctttaaaagctgagaaaattatgagctgtcttggggtaggttatgtaaaccaaaaataaaattctaagtcccccaaccatctgaatggatccctcctcttggaaaagggcattccaaagttaacctgaaaaactagttcaggctatgatgggaaggaggaggtaggagaggcctcattataccctcctcccttttagaattattgctagaacagactctttatgtctgataggaaacatttataatctattctctctgaagcccttgctacctgggggcttcacctgcatgataaaaccttggtctccacaaccccttatcttaacccagatatttctttctcttgattctaagtctttagagaataacttaattatctcaatcaattgccaatcagaaatctctgaatctacctatgacctggaagcagatcccccaccttccaactgtcccacatttccagacaaaaccaatgcacatcttacatatattgactgatgtctaaaatgtaaaagaccaagttgcggcctgaccaccttggacacatgttctcaggatcccctgagggctgtgcattggccatggtcactcatatttggctcagaataaatctcttcaaatattttacagcatttgacccttttcattgacagttatatgccctcagtggtggggagactgggccagagagctggacagatctcatccaggactaagatgctcagaccagcaggcttctagacatatcagatggctcttccttggttctcaagactgaagactcaaagatatgaatgacagagacactactggagagaagcagaggaactcataaatagctgtaccctctattccactccccagccacgatggattccaagtttccagaatattattggccaaatgagtaaataaatcagccatcaaagcacaatggaaatgggagatgatggcggtggttgaggaggcaaagaccatctccatgttctcccctctgtattctagatggaagaagatattaataagcagtgtatccagggatgaagattctgaaaaggattaatcttccagattaaataaaaattagctcctttaagcataaaaacattttgttttggttcctttgatttgaaaacattttaaccgtattatatacttctaaaacacaatttaataaaagaaaaattatatttctctctgcttcagaacaataatatagtaatttcatgatactttttttccaggatgctttataattatgatgtaactcttcacatattatctcatttaatcctcaccacaactttataatataaattatatatatttgtatatatgtatacccccaccccaccccccacacacatacatacttctcacttaaacaggtgaagaaaaactgagggttaaaaaaataagaagcaatgttctttaagggcacacagctggtaaaagtcaaagtcaggtgtcaaattcaagttttttgattgcaaattcattgctgagcttgcagagtgaagggctcttgactttctctcagggtacggctaatggcaggatcaggaatctgctaaaaacatggacactgcggactggacaatggggaatgctgggcatatgcaacaagttagtgaataagggaaggaggtcagggtagtttacggaaagagcctggcggaggcctgggccccagagaagggaggcagccaagagttgtttgcaatacctaagtgggtatgcaaagttggcaggatgctttctggcattgccaacccagaagggcctaagcagtgggtaagacatggtggaaggaagcgcttggcaaagacaggtactatggagtgccttagaaccaggccacagctagagacagggctgcagtgcaaggagcagcgtcgagacccatggagcacagactggggtggacaaagcccagtgtgtgggcttaggctaggcgggctgtgcttcagggcagggagccaggccaacccaagggcagagaccatgaggaatggggcagtaggcaggggtcctgacctggcctgtgcagctgggcctaaggccctgcaggttccacagcacacaagcacctggacacagaccaccatgggattcttgttaggcccaccctctagcttccagttactcctaaagctgcaggaagaggaacacggaggtacaggcaggaactccagcagacaccgtgaccatcatgagtaatccttgcatggaccctctggagccagcagagaatcaaaagacacaatggcaaagagtctcagctgtggactcgactctcactcattagctgtgtccctgaacagaggaacaagagctcctggaatgacattgtcataataatggcacccatacttcccttcagggttagctgagggagctgatgtgataccatattaaaaagtatacagggaagcccatacttcactcttgaagaggaaatatggtcaattccctgatatctacttaacctcggggatagagagtgaagaatttggattttgcaataatttcaatatagcagctaaggtattgtggacctacaatgtgccaggcattatggtaggtgttataggaaaacaagatgagtaacagcttggactttgggggtcagcgggggcagctaacatctagttagggggacaaatgcacaaccagtaataatgcataatacaaagcagaatggaatgtgcactgaaatggggaacatgcatggagcagctgcagagactcagagctgggaatgactcatgtggactagtgaggtcaggaagggattcacagaccagctggtgtctgaactaggccatgtaggagagttgtaattgagggtaatagcagactccagccaggacaccataaactgtgggcgtgggtcttaaaccaatggacaagtctctaaactaatgcttggaaacttaatctgcacttctaaagcaccaaggaaacatgtaatttgcctgtgaccagatcccttttagaccctctgtttcaggagccctgggcatgggacctgcatgcttgcatagtgataaagcccccaggtgagtctgatgagcgtttttggttaagagccaaatatactaaaccatttcctcgctttagcaggcttaaaaaatctcctggagatcttgttaaaatacagattcctggacttttccctcaaacattctgattcaggggtctggagtgaggcctgagattctgcatttctaattccttctcaggtgatgctgatgctatgagtctgtggatcactgtgatcactaaagccatcacctgctcttcagttcttgctgggatagtgggactcagagctaagaggtgcccttgattggaaatgcttttgaaaacaaatgcatgcttctctatcttggacctttcagaaatcacacacacccaatcaccttgaaactacctgcccatacaggtgaaataaggacatgccagaggagttcacagcattcacctgtagtctctgtacttgcttccacctgactctacttcccctgtgggccctgcttctcagttatgtttctgtttctacatcaaatctgtataactctcctgaatcttgcacatcatttcccctgcctaggggttttcaggaatgtattctggatctttttatcttctgcctctgagtctaacccctgacaaatccacctgtgctcagcaaagatacggtttggtcacaccaggccaggtagctcagagaacaatggaggtctgagcatgttctgtgtaattctctccaatactcactgtggatagattcagacaatggctttggctcacgtttgtcctttacgtgtttttggtcagctttatttttgaaaaaaaatattgctcacaggagcaatttgtgatcgttagtgtgagagaactcttctaagacctttttgtgttaggagaaattacctagttgggattgttgagctcactgactggccatgggacttggtcatttgaatgggttagctgtcgactgatgacacctgctctttagaaactcagcaacataggccttatattgtgggatttcattaattatttcttttcttctttttttgagtcaaatcatttgtgttagaaatagtaagaggtgagatgctagaaatgaagagataaattggatttgatcgcctgtacttgatttgctcacagttattggcagaggagacacacatactgtaaatagctataccacaatactatgttgttagtattgtacaatgacagtgcagaggggggagtaatcatttttggctactggaaagaaggaatctttatggaaggagatactgccttttctccgcaggaatggccagacttttgagagaataacaatatctaagcataacacaagaaatatgtgttaattaagaggaggcaaatgtgtcacatttcttatttaaccacaatgaagattttgataatattaatagtattaataacaaatatctattgaatagtttctgtatgccaaccactgtgttaaaccatttatatgcattatctaatttaatgaaacactctcaacaggtgtatgaagtgatagtatttcctcatttgacaaatgaggaaactgaggcttagaaagattaagcaactcactcaaggtcttacagagctgaaatttgaacccaggaatttacaccagggacttttcttttttttttttttttgatacggagttttgctcttgtcatccaggctggagtgcaatggcgtgatcttggctcactgcaacctccacctcctgggttcaagcgattctcccacctcagcctcccaagtagctgggattacaggtgctcaccaccatgcccagctaatttctttatttttagtagagatggggtttcatcatgttggccagtctggtctcgaactcctgaccccaggtgatccacccaccttggccttccaaagtgctgggattacaggtgtgagccactgtccctgaccacaccagggactttttaacagggattgcttgctaaacacccaccatgcactgggcacattgtgtaagttaccattttaatctttaaaacaaccctagaaagtaggtattatggcaccatcttacaggggaggatgcacatgctgagaggtgagttttgcaattttatacagtcattatacagctaggagcagaaaccaggtctgtctgagctctaaaactcatcttcctttgaccttgccagattcttgcctcttaatgagatcctttgatctcttcacccaaagtggagatgataaccatgggtgatccagacaggctgcctggggagagcctgcagaacatcttggcaatggaatgattactccacgttggcttctggctggatggaggtgcttgcctagagaaggaaggaaacaagaaaacatggggcacacaggggccaggaaggaggtgagatgttgaagccactctggtaactgacaagggatgagtttggtggggtggtggggttttggctgggggtttggagtccaggaattctgggccctaatcttgacttctaatcctggcctcaaaactgtggtaatcttggcctatttgttgtacttcccaagcaaatagctcagcaaatgagctcagttttctcagctgtaaaatgggaatactaatagtttcctggtatggttgccacgatgaataaatgagtcagccgggagcacagagtctggccataggcatgcaataatcaataagtaccatcttgctgcctgtttactttggctcctgctggctttgatcaggctgtaaagaaaaagaggctaatttcttgagcaggaaggatctgattctagccaaggaggccctggggcagggactggcatgggggactatggcataatatccatctgttcggttccttctccaggcgagaatgctggtttctgcagccttcatccaagcactaaatccacctaattggtttgaaaagcactgggtggataaacatcccatcggcttaccactgtaataatgccagtgacatttattcctgagatgaaggatgcagaatgaatggagatcagaccccaggtactctgctataaatgacagcctagacaaggcaccccctgagccaagaaatgccagcctttggaggcggggacttggggatgcatcaagcaggaatgagtaccacgcggggcttctggacacttaaggaagagcttgcaggctgagttaggaagtagatcagatttgcccatgacctggagaggtggaatgaacacgagaacattgtgctgggcaagttactgaatctctctgaaactctggttcctgtctatgggttgagtacctcatgatgttctggacatgaatgagaaataaatgaggaacctagccctgttcctgccaagctccaggtgttccagtattgtgaggttttctttttatcctttcacattttttctttctccagatcttctttctcctgaaaccacctttttctttgctccaaagatcccaagacctgtccaccccccatcacgtacccatgagggcacccccttcacccattcattcattaataccattttaaaattcattcgtcaattatgttttggtcaggcaaaatgtgccagatttctagccaggtacctggtatacaaagataaatcagacctctactctgtccttgagctgttcagaggttaatggaggacaggactttgagtcagacagagtcctaacaagaaacagatggcatgctggatgtggtggcttacgcctgtaatcccagcactttgggaggctgaggcaagcgaatcatctgaggtcaggagttcaagaccagcctggactacatggtgaaaccccatctctactaaaaatacaaaaattagccgggtgtggtggcacacacctgtagtctcagctactcgggaggctgagacaggagaatcccttgaacctgggaggtggaggttgcagtgagctgagattgcaccactgcactccagcctgggtcacagagcacgactccttgcatccccccgccaaagaaaaaaagaaaagaaacagatggcatactaagagtaaggtaatttaagcaaggcctctttacaaagggactagtgagaaaggaatgggtgtaaccagcagcagcatggctgtcaccacctctaagtccagggattcaagggggaacggaagagaactgatcttggaacctagcaacagaggggcgtgcacagcaggccaccttgagaggggcaggcgcacaaccagcccaaggtaacttcccaaggagggagcctgactttgccctttcttccctctgacatttttgggtgctccctgttgtctggcctgaccagaagctcaagggcaagggagcctgttgatttagtccacaaaggccagcctcctatggcagagggcaaggtgacagagggtggagagtgggtttggagggacaaatgcagtatgtacagtgtgtggggtataactaaatatggttgcgtgtgaccttagaatggttagaggtaggactagggagccctagccggaagtgagcaattcccaccagtcctttctatctcacctgattgcgctgcactctccaattcaaagggctggagttgatcgtcctgcctccaggctgtccacctccaatcctctccaggatggttttttgttactctcctacctccaccaatgctaggaagtgcacattttcctaaatactcaacaccctcttcttggcctttgaactgctatctttcatctccactccccaacccagcctgagacactctttcccctcctcatttcctggaactctctgctgcccttcgaaaagtcataacctacctaaacattcagaaacttacagagagtaaaaattagacacccacatccccaccccccagtatttaacaaatgttgaaattttaccatatttgtttcaggtctttttttaaaaaaaaagaaataaaatattgcagatacaatggaatcgtatgttgtacttctactcctccttgtaacactattttgaagttagtgagtgttcacctatctgtgttttttacacttttcctagatatcactgctttaaaatttctttaaaataattaccattacattataaatatccttttaaaatcttgctttttgcactcaacgttatgtgaatgttttgttgttttggctttgttggttggacatagtcttaggactttttattgacttccttctaatgatgggggttaagtaacgatgtctggttcactcttgatttaagaagagtggctttcactgaaatttcataagaacccaaaattgcagtaattgccaagtcttttgcagctcctcactttttcagtgtaacagcgtggctgctcgcatccctgtaatcttgctatgagggaaagcaagcggccttatctgaaacagaagcaaaggtggctgctgcagccctcccccatccccatcccctggaggtctcctcctcccttcctggggtgaatgcttgccatctgatgatctccagccgctgcccataaacactggcaattctcttgcaattttgatccattctccacgtctagcatcattataattatcaaaatttccagacttacaccgacatcatgagaggaaaagtgaaaggctgggaggttattatttggtagccctgttcactaagtaaggaaaagcatgaaactgtcaccagacatcactgaattctggagcagctttgactttagacttcatagtccacacgcttaagtatgtggcacagaacactgtgccagttccatagaaaccattctagcaaggacctaaccggaggacctatggtatatcatgccaggagggtttctcctattctcagtcccagagaccttaggaatacgtgaccaccatcactgcgacctccaccatcccatttataatcaacattacgcttttgagccacaactatggtgacatgtctagctctatttcagtaattatggttactaaatcttattccactgtatgactgtatcacaacttatttatccacttccttatcgatggacatttaaacttttcattctttgctattattagcaatgctgccatttaaaaaaatccttcaactcatatagaaaaccttttgcaaagtgtgtgtgtgcatatatatatatatatatatatatatatatatgtacaggggtgtgtgtgtgtgtgtgtgtgtgtgtgtgtgtcagttcttggactgagcaccaatggaagagagctaccctcaagggaggtggatgacagaacttccaagagggggtgcagctgagagctggccaaatggtgagagtgcttgctaccctcagggacaaatcgttcatgtgtccctgtgggaggcccagatgaaaagagtaggctctggcagaccaatctaattttctcccgaaggactgtgcacagaaactgtgcaaataagagatgcgacctctcatgccacccagaagcctttccagtcagtctcgtgtggcatgcccgttcatgagtgaaggcagaaatggtttgcatataggacttttcagcctcagcagttggggagacctctacgttatttttggagaccaaaaacagtagtccaagaacaagcctatactactatataatctcagtgtgtgtatactatgtatatgtgtgtgtatatatactatgtatactatacatctatctgtctatctggctctatttcattaattttggttgctaaatcttattccattgtatagctttatcacaacttatttatccacctccttattgaaggacatttaaacttaaacatatatatactcagaattgctgggtcacatgctgttggctatctatccatgcaaaatatcaccaaatttctcccccaaattgatgtctatttacactcctgccagtaacatctaaaaatccctattagaacttcattttttaaaatttctagacttcaaatttcaggacaatataaatacattgggaagctacatggtgtggtagaaatagccctgaatcagtgaggtgagattctagctctggctctgtccctgcctggctatggggcttgaactaacatgacttcctctctgggcctcactgtcttcatagtataaatgaaggcatagcattaagatgtctcttaagtttcttcctgccttcaccttctgtagtctgtgctttaaatagtggctgacttaagagggcaaggggaattcattcatttatgcatgtgcttcttctttcactagatccttaccatgtccctactgcctcctagacactgagtgtccacatgaacatgaccacgtccctgccctcaagcacctcactcttgaatagggaagacagccattcacatggagaagctcaggccatggtgtcccacactagggatggtcagggtaggcttcctgctggaagctgtgcattgtcttaaggatgagttatagtcagccaagcaaagtataaggaaagtcatttcaggcagagaaagacatagaggctggaggcagctcagggcatttgaggatgtgccaagtaatccagactgattattctacagggttgtggttggaaaagtagcctgggatgaagcaggagtagctagtcagaggccaaactgcaggtaactttgtgatttaaaaaaatgatcttgatgcttttcctgatgccaccaagaatcttttgccaaatgcctactgacccaaggggaacaaggtagcttattaggtaggtgagggctcagagtcaggcatggcagcctagctgggcaatatcccaatgacagcaccaatggcggagagctaccttcaagggaggtggatgacagagcttccaagagggggcacagctgacaactggccaaactgtgagagctcttgctccccttaggggtaaactgttcatgtgtccctttgggcgcccaggggctagggggcttaaggggcatctggggaatccaagtttaacttccctttatttttcacttcaatgtaacatcaaacacgaactaccgttcttggtctccgtaaatagcacagaggtctccccaactgctaaggctgaaaagtcctatgtgcaaaccatttctgcctttgctcatgaatgaacatgctatctgagactgactggaaaggcttctaggtggcctgagaggtcgcttctcttatttgcacagtttctgtcaatccttcgggagaaaattagattggtctgccagggccagctgttttcaaagccagggtggctctagaatgattccatgggagccgttttactggagaccagagagtctcagcatgtgagagctggaagagtccctgggtcccctagttctaccattttattttctgatggggaaactgaggcccagctaggagaattgatttgcccaaggttctgcaatcaggtgataggattgtggagagagatcaggattaaaatctttgtttttactctgtgttcctagatgcttctgctaaacagaattcttttgaaagttattctcgaaccactaatgaaaatggacttcattagaagaaaactttcatgttcaggttgcatgtcaagataatactgttaggaagtacatggatgggttgctgttcaccatgacttccaggagttttattttattttattttattttgagacggagtcttgctctgttgctaggctggagtgcagtggtgtgatctcggctcactgcagcctctgcctcccgggttcaagcgattctcctgcctcagcctcctgggtagctggaactacaggtgcgcaccaccacgcccagctaatttttgtgtttttaatagagatggggtttctacatattggtcaggctggtctcaaactctcaatctcaggtgatccgcccacctcagcctcccaaagtgctgggattacacgcatgagccaccacgtccggcccctaggagcttttaaaaccatgtgttgagctgtttctatatttgttgagggaaagagatttttttttaagagcctaaatgataagatttggtgatgttttggtgaatgttctgggtttcttgtggccatgtgtggccccagtctctggagatgtttgccagaccttgtttggactcagttagttagaaagaaattgtttgtcttgcacacaacagtgttcagctaagtttctttgctgtgtttgcaggagctggaggaattgcagggaacactggatgggggtgtttcttcaccagtgggccttctggggtgcttcccagggccaaataccttccacattcacaaaagccatgcagtcaaagccctgggcataacccgtgctggggcttgcttgcccagctggatggtgtaggcctggctaggaccatgattgattaggctgtgaccaggccttcgcaaggagacaagggaccctctcctaagctttcatctgagcaaggccctgtgcccccctccccaatccaccctttccctgtgggcctcctttccaatctttaaaactgtgtgctcccggaaccctggttcatggtaaacatcccctccatatcttcaacctcctcctcccctttgcttccttgtgctaaataataggggtgatcccctgaggcccctccttcccatggtgaacgctttgccttcataccccagaaatctccgggttctaaagcatgctcctcactcccagagccattcccagaccataaatccacccatgtctaaaacaaatctcaatcttttgaggcatatgccatcttcccattccattttaaaattcattcaacaagtttgtactgggcatcattgtgtgccaggcactttgcaaggagctggggatataaggacaaaagtgtcatggttcctgcccacgtggggtttcctttctcatgggggagacagacactaaatagacaaagaaataaacataaagaaaaagaacagggtgctgtgagcaatagtaacatgaggaacagatttggaggggtggggctcagtcttctccaaggaggtaacaattccagttgagacttgaaggacaggaaggagccacacaagagaagagactggggtggagtctgcagggaagcaaactgcatggcagtctggagaaaggagccttcataaacgaggaattggaaaaagtccatgaggtggtggagcagagaaatagggaagccagaaagcaagaaataggctggagagggaggctgggtacctgtcatatctccaagaccaggagaggagctgggcttttcctgagtgcaaggggaaggggggaccattgaccatctccttactttctataaagacctgctcgccaggtggtatggagagtttaggcatctgattcattctggctccttatccccaccccagccatcctcccgaaggactgtagaaaccctctaccccaaagacttccctcttctctgcttcagccacccactctcaaggccacaccttggacctgaccatcaccaggagaggctccacctgcagcatccaacacccatgcctccttctcttccactgcaaccatacttcctttccctcctggtccctcacttagttctccaggtttgctctttgacctcattaagatgctcagttcttgacctctcaactgtcttctgtcacccagtttttaattcctcccctctctgtcttggacaccactagtcatcatcagccaccaacctttccttgttcttgtcttcatctctcttgtgcctgtcctgcaaagtgcccatcttgcacaattcattgaacacctttcaccttttctggtgcctgagttgctgagggtaaatgctgcaggtgtgtccctttgtgaattcatgatttccaatgcctcctaagcctgaaatgctgcctgtttgaggttaccctggccatctctttttctcacgcgtgcttactcttcatagtggttatttcaaatcttcacaactctcttctaaacttctctcttcctgtcctcccacctgactctcaacagatgagttagcagatcatcagacagaaactcccttaactgcctggcacaacacctacaaattaacctgtgtttgtgctctttttcacctttgtctttgttgacctgtgctctgcatcccaatgtttcctccctctgtggggaggttgctccattgatcatccattcacaagaaagagtccacaaatctttgtccttgctgtgtccccagtgcctaaaacagtactgagcacacatgagatgtttgagaaatagtcgttgaataatttctcccttccttcaacctctacacctctattgattcattacacttgcatttaaacctgctcaaggtttttttaaaccatttaaaacaaaaacaaaacaaaaccacagtgaaaacctcttgacctggtgcaccttttccttgggctagagttctgtgccttatctcccctatccacatggccttgaacgagctgcctcagccttgtcgccgctccattacctcccatccatgcctccatcccctgccacttggcttcaccctcccatggaaattgcccttcccttcataacctcatttttgccaagtacagtgcatacattttatgccgatagcacctgtcctcttagcaatgactgacctgctgccctctcctttctttagaaaacactcttctcctgatatccatgaccacattccctcagctctctgctgctctggtctctcctctcatgtggtttcctcctccagtcctctctttgctccagtcagccagattgctctgatgcaaattggatcatgtcacccaccttgaaccctctgccatgactgtcttgtccatggatgatgtccagattttttccatgtggttgttgagactcagcctgctgggcctctgaagactcatctcagccattgtacactctggtctactgcaggatgcatggtattcacttgcctctagtcaaacatgggcaaaaacccatgctgttccctctgttcatatgaccttctgccactttgctcctaacagctcacttgatttctgcaccacaaacctaactcaaccctaagtgtttcagatcttctgctaaccaggcctaatcttagacttggactggatttgcatcccctatcttgtgccaattcccagtaatatcccatattctcgagaagtcatttatcattcaaaaaatatgttcaccttcattttctcatctgattctctcagcagccctgggagatggggatatctgctataatctccattccacagacaaggagactgagggtcaggatttcagtgacttgtccaaggtcacacagtgaatagacactgggtctaggacttgaacccaggtcctctaactcctaaccccagctgtgcccttgttctgcatccttttcccacactaccccatcacccccaatgccaaccttcccaggcaggccctgagagggcgacttgccagccttctctcggacacacctgttcaagacaggcctggcaatgagaattgtgattgaacagatggtggaaacacaccgcaacaaaatctccttgttccttaaaatgaagtgttttcttttccttgactccatttccccagtgaatggggaatcatctgctcacatgactaaaaataagtgactaggaaggacagagatgaatgaggcggagagaatggggagagatggcaaagaggcagaagcgggagggaagtctttaggctgaagaaagacctttcagagaagaaaagctgtggctgagtgggcctcctgcatccccacgccacacagatctacgcggcctcctgactcttccagcccgttacttccttccatccctgattaataaaaccagcatcaccggccctggcatgttgtgaattgcagtgtgggctccatcaagcccaacatctgcttttaatcagttttccattgctcctttgattgcagttttgcccaagtcttgtcacaatgggtcccccgatacagccacacatctggactgcttccgaaggagctggaatgccatcaacctgaaggtggtcttagcaagtgggctctatcctcagacaaggtcacagaggactgctctttacaaagaagggaaggaggaagaactgccttgcctcactcggcggggctctgcactggcaggtggagcgaggtttctccccattgtgggccgttcttagctatgtgagctcatacacgttactaaacctctttgggtccctgttgcctcctctgcacaaagattggaattataggactttactgtcctgaagtcaggagaaagactttcctttccagggccatgacttatcctactgtggtttggtgactattcatgctctatcttatggcctattcatgctctatcttatggcctataaattggaagctgggatgaaatcagcaagtgtggtaggctgaataatagcccacaaattgtccacgtattagtcctcagaaccaggtattactttacatgacaaaagggcccttgcaggtgtcattacattaaagatcttgccatggggaaattagcctaggttatccaggtgggcccagtggtatcacaggggtccttggaagagggagacaggaggtcagagagaaggcaaagtgatgatgtgagcagagatgagagacaggagtgatgagccaaggaatgagggcaacggggagaagctgaaaaaggcaaagaaacacattctcttctcagaacttctaggaagaaacagccctgctaatgatgtcttaactttagcccagttaatctgatttcagacttctgacctccagaactacaacagaatacatttgtgttgttttaagacattaagtttgtggtgatttgttacagcagcaaaaggaaactaatatagtccgacacattttattcataagtaaaaagagcaacatattatacagcccaattcaaggcatatagggaagttcctgtgtccaaaagccacactctgggagatgcccccatttaagacatttctatgggcaagaataatgatatccccattgaaatgcatttccctgcagcagcactggccagtataaatatgacataaactacacagataattttgtctagtagccacatgaaaaagactacaaattaacaggtgaaatgaattttaatatattttcttcaacccaatatattcaaaatactgtcatttcaaccagttaccaataaaacaaatttactgagatattgtacatttttctggaccaagtatttgaaattgtgtatttaacatttacaatacatctcagctcagaccaactgaggtaggaggtgggactggactctggaagtggggcttggacaccggaccaaattgaggactagctaaggcagggacagggtagaagcagctttccacaagaaatgcccatgagtgtgacatgtcagtttaccattgccatggcaacacccaggagttactgcccctttccatagcaacaacacaaaagctatcacccttttcctagaaattctgcataatacacccctacgtgtaattaaaagtagatataaatacaactgcaaaactgccctgagctgccactgtcagcacacctatggggtagccctgctctgcaggagcaatcatggagctgtaacactgctgcttcaagaaagctgttttcttctactctaccacaggctcacccttcaattctttcctgggtgaagccaagaaccctcatgggctaagccccactttggggcccacctgccctgcaacatagtcacatggggctatgatttgatcttaggtccaagcagcatagttctaaaaggttaagactattggctcctaagagttcatcatcagttcatcagactctttctaactgaccttgagtggataaagggcctagggaatgtagcagccatggaagccctgagtaaagtgcaaagcagacatggttaggaatggctgcccagggtcaagccaatagccagtgagaatcagggctagaatccaagggcactgcctccctggccaggccaagaaggggaggctgagacttcagagcagtgaagctcccactggacacactgtcttgtaacttactttttatccacttagcaatgtatacagttagtaggctccatgtgcttcaatatccttcaagtacttaagcttagatgacatcaaacccatacattgtgagatgctgacacaatcatttcctttaggccactccatctttcttcacagccagtgagactccgggacccctatcacctcccctaaactcaatgaagtgggatccagtctccaattgctgccttcttgcctgcctctcagagggcctcatcatttcaaggaacttgcttcaatctgggagacagattaagtacaagagaactcaggaacttgggggatattttggagtttaaataaaacactcagtgtgaaatgtctgacccagagcttggtgtatagtggtgcaccccagtcccgagagaacctgctaattcacggctgctaataaatagctgaagtgaccagacttgagccttcccagttcatgctcagaactggccctgctctgtctggtccactgtgtcagggggcacatgccccttcctgcctctgctttgctgccaccttgcccccgcctcacggctgtgcctatagctcactgcttcacctgccaacccagagctcatcccctctctcccttcctgatttgctgtagcttgcactgactcagactgactacctgtccattggctcctagaacgtctctcatcatctttgcccctcaccttgacccaggaatccccagacataataaagatgatggttgacacctgactagtgctgacacctacgggtagtgttttcatggctttgcctagattagctctatgttgtgggcatttgcatgatccctattttatgtatagatgcccccaaagttcagagatgttaagtaacttctgcaaggtcacacagctgttgtgagagagttagcttttgaaccaaggcaatctggcttcagagtccatcagcttactcactgcatcaaactgcctctactcacgttttttcctggagcctggtacagcacctggcatacggtttgagctccataaaagctggttgaatgaaagcatggacgaatcacttttacggccctggctccaatggtcaagagacttcatcagtgcttgttggggattcccctacagggacaggactggggagtgtactgctccaccctccaagatgacaacttacacctcattaaagccttgttttggaggaatgtcctaatatatcacagggcctgaggagacataaacagcctgaagggctccctggttgacctgtgggccttggacactgacttcttagtgccttgagcagtgacacaggatgggggaatgtgctactgctgttcctcccacttctcactggccagctttcccctcattcagacctcagcatgttgttctgaagacaggagggagaaccaccaagtgagaaggacaagggcagtgctgagttttctctctgagggcaggtgtcagggtggagatgcgcagcacccaaccacagcccagtcctaggtggaggtgtggcgggaaagagaggggcagatgcagaaaggctggctttggaaatcatcctgcagtagtagaagaggttcttgtttttaattattcctataagatttttacaaacaccatctgatatgattttgtgaggctttctttgaaagccacttccagacaagcattccaggtgaagcagaattttttttctgggaccaagaagaatttttaaaaactaagtactagaacctgcaatggttcccttttaccaaataggttaaattcagagcattctgctgggcatcccgagtcctccagtaatcacttctccatcatcaccacctgttatatcccagcaaggtgactaggaaagccagagccaggaggggccccacattgatactgatgaaatcaagactcagagaggttaagaaatctccttaaggttgcacagttaagagcactggctttggagtcagaggatctgactttcaaccctggcccttccatttatgagccatgtgacctagtgcaagtgacaaccttgctaagctttggcctcttcatttgtaaaatgtggacaatcacagcagctcctataggtttgttgtggtggttaatattgagtgtcaacttgattggattgaaggatgcaaagcattattcctgggtgtgtctgtgagggtgttgccaaaggagattaacatttgagtcactcactgggagaggcagaccaaccctcaatctgggtgggcaccatctaaccagctgccagcgtggccagaataaagaaggcagaagatggaagagcaggcttgctgagtcttccagccttcatctttctaccacgctggatgcttcctgccctagaacatcagattccaagttcctcagcttttggactcttggacctacatcagcggtttgccaggggctcttgggcctttggcaaaagactgaaggatgcactgttggctcccctacttcggaggttttggggactcagactgatccaccactggcttccttgctcctcaacttgcagatggcctattacgggactttaccttgtgataaactccctttcatatatacatagatcctattaattctgtccctctagagaaccttgactaatacagttgttgtggacaatgattgagaaaatgcatctatttttctacagagctgagctatgagttagaaagctcagtatcagtttaccaagtgagaggcagaggcagtattagaaacgccgtcactctcccccaccctgtttgctttccgttgtgctccttagcctccctgtcatgcctctattccagacagactgctcttctaattagggacttcctcacctccgcaccttcgcacaggccatcccccagtgttaggaaactcatttcttctctgctggccgaccaacattacaaaaacatttttcaaatcacactgcatatcctttattattagcattcacatcagggtcacctctatcaaattctgtgaaagattcttttttatttttaagtccagaaatgtgtttattttggatgctttttatttgcaagtcctaaaatgtgtttattttggtacttgtgttcttttgctatgtttggtgaatatatagttggattttatgttcatttctaatcatggtaaaacacacacagcataaaatgtatcatcttaactatttttaagtgtcacagtaaaagattctcctgtaaagaattcttttatgaccctaccacatccctaaaactcacgccctacctcaccctgagcctttagctcagaacagccccacctacccacattaagaaggagttttaggcatctcccacctccacagtgaacttcccaggccctccagccttgcccttttttcagtcctaatgacacgctccatccccatgatggtacaactttggcacagagttggcctctctgatggggtcttcttggatctgatgctgagttccccgagactcttcacctggtctgacccagtagcatgggtcacagtcccaacccctccctgatgagatgatcccctaggccactgtgtcttcaatgttctgccttcaaagtccctgcccttccagcctaagagaagagaccacataccattcctgatggtccagaagtctagagtgagaatcctgcaaggaaaccatctggctgaccctggctgatccttggacatgggcatcttggtttggcatggccctatcactctgactcctgcccacccctgtataactaaaagccaccattactgagggcttcctctgagccagacactgtgctgagagttttacacacatggtcttacttcatgctcatgaaaacccaaaggggtgggtattattagccccattatataaccaggaacctgaggctcaaagaagtgaaggggtatgtccatagatgccgaggagctgacagtcaagcccagtactgcctgattccaaagccagtgctcgcagccagaatggaactggctctgcttcgctctcttcagtctccttacctctgtcatctccttggacacttccttttcagtgcatgattgccagcccccacccaagtcagctcactggccctggacactgaagctgtcagtttcccatctggagactccatctctaagacctcagattccaggccagggccacttcctctaataaaagggatgaagccacagacccaacctccagctgaaactagatttgctctacctgttcacaaaaatgaacttccaggtcaagcttttggccaagtctgacaaagtactgtgaaggccagccttcctgagtgttcactcattcaccaagcattcactgagaattccccaggactgtaccatgtctgggacatgggaatttgggcccctttatgctcagtccttggagagtgtatcttagtcctgagtacccaggcaatcggaaagtcttggctttaccttgaaataagaacgcgagcccactttattccacgatcttaactgaactacctattcctgatttaaacatttctttctggactatttgcatttatattttatatagttgcaacacaatgaatagacaattttgtgttttgcttttatcatttagaacagccaaatccagcctactacctgtttctgtaaataaagttttattagaatacagtcgtgtacattcatttacatactatctatggtgactttcacattataaggtagagttaggtcattgctatagagactgtatggcctgcaaggcccaaaatatttactatctggctcattacttaaatagtttgctaacccttgatttagagcattggaaaaatgttgaatagtctttctggttataataattaatggctacatgataccccgttaggtggcctgtgatttttaactcatcactttccatgtggtcagataaatttgttggtgtggctggataactgcaatgaagattgacgtggtttggctgtgttcccacccaaatctcaccttgaattgtaatggtcactacctgtcaagggtggggccaggtggagataattgaatcatgggagcaagtgttttccatgccgttccattgatagtgaataagtctcatgagatctgatgattttataaagcggggtctcctgcataaactctctcttgcctggcgccatctaagatgtgactttgcttctcttttgccttccgccctgattgcgaggcctccccagccacgtggaactgtgagtcaattaaacctctttcctttataaattacccagtcttgggtatgtctttattagcagtgtgagaacagactaatacaaagatttttgtgtgtttgttgaattatttccttaggaaaaatttccacatggagtcttaggtcaaatcatctggcattttcgccggggataatcaaaattctgtccctgttgtgtttgtcttggtcctattttatgaattgaccttcctgagccttggccaactgatacctccacctgaattcagaatacctttgttgaatttctgttctaggggacctttctgctcagttcactgaggtcgctcttccccacttgccttgacctgccctgcatctcccctgttcctcttcctctgcagcttgggtttgcacctacttccattcctcctctgccaaccccactccacacagtggttctattttctgtcattttcctgcatatctctcatttgcaattcccacacccacaggacatcaagcatccagaatagatcttttagtgtacaacaaagtggggttcaggccagaacacacacacagacaatggggaagggagggatgcatcacaagattcctcccctcggctctaacatgatgctgggcacccaggcccaagggctacttgtcaagaggatttaccagtccctgcctttgaccttgctgttgtccctgtctgcaattcatttccgcatttcctacagtttctggctcctcgaaaactttccatacattggcttctgatttactgcatgcatagactatttctatgggagagcggctaataaaataggaaaaactctaaaaaaggatttttgccgaacactgcatgccagtgagtttccttaattgcagcattaggaacatatgcaattactttcatcgagttgatctaacatagtcatttggaccctggaagaagcctaatcattctgggaggccaggcccctgtgttagaagctgttggctgaacgatctcatccctcttagtgaccgatgaacaagttcctctctcagaagcctggcctgaaactagaggctagagggtctctgtctgatgcttcactcctctgagaacctctctgccatggtcagcctgctgcgcttaagagggaaaggcaagagggagtcagtatttagggagtttattcattagacatgtctctcttgtgagaagcttaaatctcatgccttatattttctcctcgtggccctaattttgccttccaggaaagagctgagcaagtctaatcttttttgtagcggctttttggacatttaaggattaagatcctgtctccctctaatcttctccctggcagctgaaatatctccaattcctttaaccactttgcgtttgccattagtcctagatctcttgccaaaatagggccttgctagaagttgcaatacccgtaatgtaataacacagctagcatgtattaagtgtgcgttatgcagcaggttctaagtgttttacatctgggaattcatttaatctgcacagcaattccgtgtggtgagggctattactgttcccatttcacggatgaggaaactgagcacaggccatgattgttaaactgtgaattgggtcctggtgctgctactcacaagttgtggtgccttcatcaagttacttagcctcactttcttcaaccataaatgggaatgatgagctccacgtcatggagatgtgaagattctaagaggaagtgtgtacgaagtcagcataggttttcttcagtcctttctggggaaggctgtccttcagtttgacattatccttcccacatagaaactcagaaaatcacactctgaatctttggtctccttcctcttgcccagggtcacaccaccttgttgagtgaacatacctttccttcctttgccccatttaaaacagttggccctgagtaattgaagtcctgcacaatccagagtgaggattctggggattgtggacctatgacatgggctggcttctaacattggcactggtgagctggggggacacatctctaccatctgtgatccatgtacacatgtgacagtgaactactcccagcctctttgcctctgttctcagctctttcagaagagggtggttgctttgtggaatgggggaaagctgcccagatagctacttggtgcactttcctctctgtacatagcctgcgtggatgtgggtcaagggcccccgtgcagccctgccctctaagccacagaggtttccagccacaggcagctgaaatctctccagaaccttggttctttttatgtcagggctatagtcagtcaagttttccaaatgagcagttatagaaatacaaaacaggctgctaatttagtagctacagacttctttaaacaaacacttgaagcataaatacagatgagaggattttggaaacacttgtggtcactgggcccagcaaacaaaggggagttatggtttcttcaggctccagggtatgtgctgggctcagccacaccgaaggctgggcttagtcttcacctttgctctgtactgggctgtacatcctcagaggggaatgtagcctcctttgaatttcctgtccttcttgtcatatatcttccctttaaaagttttgttttgaaatgatgctgttgtaagaaataatatggagacatctgggatacgcttcacccagtttcccccaagggcatcccctgtcttggataactatagtacaatctctcaaccaggaaacagatttgaccgtgggtactttttgaccctctgtagcttccatagcttttcctttctcttctaatttcccttgctttctttctctcattctttcttgcccccttcagtcagtcaaggttctcttactggctgctttcctcttccattttctcctctttttttacactcctttcctcccgtgttactaggactagcgctctgttaaagcttctattttagctgtgtccttggggagaacccagaatcggtctgcccttgccttgctgggaacccgccatccttcccccaagatagcattcttactctcccctccctccaccctgtgctgggatcttagctggagagacacttccaggccagctgcattcaagcccacaaaactcaaaaaggatgagtcgctccaggattgggtttacccatctgattagtatcaacagtgctgacccaaatgtaccctatacaatgctgttctggctcccactgactaccctctgtagaagttattatagttaagatactcctctcaaaggtgggagactcttacagccaacctgattcaattttcccttgtagtttggaaaattgagactctgaagcgaaaggtttgtctagatcccatagcctgtggctaggaaatggtaagctgggccaggacctgcccttctggcttctcttccagtgcccctctcaatcaccaggaaccactgcctttccccagacagcaaaggagggggaagcccaagccaacagcatcagaggccttctgcgtgcctgttgtttggggatcagtaggaaggtcttggccctgtcttttctcatgcttttctttgttccctagagacagtgacttctgagatgagggcctgttaataggtgactcctccatcatgcatgggtcgttgccatggtgatgaagagctcatgtttggagccaagactaatgatcctagactcttagagattgtggccttgggtgagtcactttctttccaagccacatattcctcctcttgcaaaaggagcataacaagacattcttcacacgagtattgagataggtcaatggaataaggtgcattgggtttagctcagggatggagtcgcaggaagtgcacctagaacagcaatgaagaccattcagaaaaccctcacggctgggaagcagcatacactgcagcacacattgtggggtcacactgaggtaggagcaatggggctggggcttaaagctggactggacaggacttccctgaaaacttaagcctgtgaaaacagcaggtagcccacactgcccacttcggagcattctgaactccgctttcttttgatgaaactttttctctccctagctcattattagctcacatgagctctgcaggttagatatggagatagaaagtgatgacgccctgtgtctagggcatcaccctgctcactcacaggaaatcttcctcactgatcctggtggcctctgacctgctgtgctccagggtctctctctatactcttgttctctcagaagttcccaactaagtgattcctaagtctgactgtgcatcagaaccacctgcaaagaagaagtgaattgaattaaaggtttctggagtgagattgtggtttctacataaagctggaatgagagggagagaagtgaggggtccagggtgcaaaatttagggaggcatctgctatcaggattgtccaaatgcaagttctgcccctgagagtgagtgcctccttaaattttgtgccctggggggctagcttggtccctagttctgtccctgtctctagacccaaattttaaaaatcttgccagggattctgatgggtacccaggggataacaccaacctgctgccttgtttggcccctgatcataactgctttcagtgcaggcagcattcgtcctggtcctgggcaaagaagccatgtccaagtgccatggccaactcccatcgttattctcatcttctcggaaaccaagaaggagcatgatcccaagtctcgagtctcctctttgactttatttttctcagttgctaaaccaaatcaactcccttcaccccatctggcagtatggctctctgggaactcagattgatcttgcgtgcctgtttcctattgagttgggggaccacagtggccgttcctgcttcaatcccttcagtaagtaggagggagcatttcctaggctgggtcctaatggcacctaatggtgccaaaggccaggccccccaccctcctgaagctaacagggtaatgggggagacaccactaagtacacatccattcctgtgaactgtggggaggcctgccatggagaagcatagggagccaggccagtgtagagaaaggcacaacatccaccagccttagggatccaagagcaaagtcattcctgagaaagtgacattgagcagagttctcaggatggatttgcttggctgaaggcagatgggaacatcccaggtacaaggaaaagcaccgacaaaggccctagacaggtgaagactcagagaagggaaggagaccatcaatgtagccacagaggcagattgaacccagactgcatgaacaccacatcacagtctttccctacaagcattggccaagttttgtggaactttgggctgatgaatgacgccacctgatcggctttataaggacatcaggcagcattgtgcaaattgatataagggtaggaaaggcagaagaacagaaagccatgggcattgtctaggaaagacaggatgagggcttggaccgggctattggaagtaaacatgaagagaaaggatggcaaaagtctgctgagtcaatttctccaagcagtttttccctcctcccctcaaggctggaatagtggccccttctctgcttctatggcaccctttgctgtcctggatcagggctcctctcccactgcggttgtcttcctcaggatagaaactatgtcttatttttaattctcaccaccagttcctgctatgtagcagtgctcagtccacatctaatgttataaagtttagggacttggcatgactgaggcttcccagccatcacctgacaattcaaatgccctcaccttctgagcagcttccagtacatggcttggaatgggggtcaattgcagaaaaggaaatagttattgtaggtttttttttttttttttttttttttttttttttagatggggtctcactctgtcgcccaggctggagtgcagtgatgcgaactcagctcattgcaacctccgcctcctgggttcaagcaattctcatacctcagctccccaagtagctgggattacaagtgtgcaccaccatgcccagctaattgttctatttttagtagagacagggtttcaccatgttggccaggctggtctcaaactcctgacctcaagtgatctgcccacatcagcctcccaaagtgctgggattacaggtgtgagccaccatgcctggcctattttaggctttttaagtgtttttcctggtgctctgtgagtctcctgagaatgggaccatagctgtttgtttaccatggtaccctcagtgcccagcactttgcctagcccacagtggatgctcagtgaacacattggatgtgatggggggaaaggcaggggtactgcttaggccattgctggctgcaagtgttagaaacccaagtcaaaataggtagtgggcatgtgtgatttgtctccacagcatccatgtccccttcttcaatgaatgaatgaatgaatggacagcttccctagccttccttaaaatgctgtcttgctctgggtcaaaccttcttgttctaggtcacgaatccaagaaagcccttacctccctgggccccacatgggcatttggagaaagggcccatagggctgtttccaatcagttgcctcctttatcttcttccatgtagggttcaccttggggtatataaatagcagggaattttcttgatgcaactttttttttcatttttacaagaataggtcagaggaagggccctgaggggaaggttgaaggacctcgaaggaaagagctggcaaacagtcagcgaaagcacactttcctgagattcattagttccctgaagcagtggaaagaatgcagagaagtctagttcttatctaaaataatccctgcttcccttctcctgaggatcctgcccccactagggcagggggagtgaagaggggagggcacgaaggtgccattgtgctggcctatcacccacttcacaaacccaatccacacaccttacaatcgccctgagggaaggatactcaacttactttttttcagataaaaaaaaggaggctcagagaggttaagtcacttgcctaaggccacacagctagtcagagaaagtcactagaatgtcagatataggcacctagagagtgtcactagaaggccagatatgggcacctctcttccccacaagctctgaattaaaggaacgtggtaagtgatcctactggaataaaaacaagagggcaatcacagtgggtggctatagccaagggaagttcctcagaggaggccaggctcaaaagcaattctcatggagcaaggagcatgataccgagggagatgaagaaggatgtgtgctgtgtcttttgtccacaaagcacttctggaaatggatagaatcatccccatgtttcagatgagaaaattgaggcccagagacttgagtaatgtgctcacagttgcttcactcgtgtgtctgttgtgcccatgtgatccggggtccctgccctctgggctaggaacgctcccaccaggaactgttgagcaataatccaaagctggttgtgattccgaggcaactcaagcagcacagacagtgatttcatccccaaagagcaaaacatcaaaacagttcagaacaagacagggagtcaggcagtgtggagcgtggctgctgtaggtgggagaccaaagagcacgggagtttggaggctcttgggtgagtgagtgttatgcccagagagactcatgactattcaggaggcgttgaagcctgtttaggagcactgccctgggtgagggaagagcaggggagccggggctgacaagcacttgtgaggaaagaaggcggcctgggggaaagagtgcagagggccaggcttgaatgcacggagctgctcgggtgaagactcaaggagcccttgctctggtcccggcactgcgctgggctctgggatgtgggaagcataaggcacagagcctttctccggggctcacaggccgtggaagttcaggatgataccacgtggaaagtgctgcaatgaatgctcttcccaatgttgtggaagcaaagaggaatgagtgtgtgtgtgtgccatggccttggggagaggcttccagagaaggtgccgttggacagggaatgagaggatgtgcatggagtatgttagagatgcagggaacagacatttcccaaagagaaaagacatcatgactaaagcaagtgcatggttttactgggttctgaatcatagaactgtctggaagacgaggagttggggtgatgggtgaaagacaggggtactgcttaggcaattgttggcagcaagtgttgaaaacccaagtgaaaataggtagtgggcatgtgtggtttgcctccccagcatccatgtccccttcttccagccacagctggttccttttgtgtttgtttgattgaagtgggggtgtctacatctcctctaccctcagtccctctggtccagctgggactttcacaagcagctccaggctgaagcacaggattcaggcctaagccaactggcaaaacatttccccttgtgttgcaagttgaattgtatcacctaaaagtttatatgttgcagtgctaactccctgtctgtcagtgtgactttatttggaaataggggtctttgcagatgtaattaggtcattctagagcagggaggggtgctgatgaaagaacaccatgtgagatatagactcacaaacacagggagaaggccacgtaaacacgaaggcagagatcaaggtgatgcatctataaagccaaggagggaggcatggaaaatattgttcctcacagccctctgaaggaactgccaacaccttgatcttggactttgtcctccagaactgtgagacaatatgtttctgttgttgaagccacccagtctgtggtactttgttacggagaccctggagaatgaaaacacctgatgatactgactggttctgtgttgggcagcagacctaagctggttcaaccagagtgacacgtaacttttgcaggtgtcacctgccatgcctttggccactttctgttggattgcacctgaagttacagcagctgccaccataagggcaagcctttgagaatggaggccacagagaggaagcattgccgagacggagagaaagaacccaggtcctaatgatggtgttggcatacctgcatcaggccgcggccagagctagctctccttctagactgtgaagtcatagaagccaacaagttaactttttgcataagccagtttgggtaagttttctctaatttttgacagagttttgacttacacagtttaattaaaaaaaaagaaaagaaaacggggaaaaggatttcctagagggaggctgagactacatacagaaaaaaaataaaataggaaggaaaagctataataatcacagcagctgcagaaatcttgggaactgtaagtaggaatacattcggctggcacattctctttttttctcctccttttttgaatggggtgaggggcagggggtttccacgtgtgacagcagcatagcagcacagtcataatcacaccaacatgatgtgacaggccaaagtagcaactgccaactctgggatcacaccctgagagtctcagtccagtttccagagacagctcaggaagtcccaggggagggttttgattggcccactcaagatcatcacaatggcccatggaatggctcctccttatctgaggcctgggacaggcctacaagctgccattgggtccattccaggtctgacacgtgattctcattgtaggaaacagtaattctatgatctgttaggagaggttcagaaagaagagttgcatggtcaaatagatgtgggtgaccttggattccccagttacgtagcttgacctcagacttctcagagcctttaacatattgtgtatgttgaggatttccagggggcagggaatatgtgggcaacgttctgaaacttatccgatgataaaacacctttatcccagagtgtctaaaggattataccttttaatggtaagatgtgtgttttcctcatgtttgttttctcctctgtatctagactagtagattgcacacagaaggcactcaaagcaatcccagaagcccagtgctggaaagggcctcaccattcagctggcctggtgttccttgtatgtgaatgtgtttatagcgtcccgctacaactctctctgatattaccacgtctacactaacttagttgttttagtatcgacatggtgcctcccaggcaacgcagtgtcctggatgagaacgggatccctgatgcctccatgcttctgagcactccctggtctgcagggaccatgggtggcatctgaatccccagtgaaattccctgagcctcacagtcccagtgggccttgtctgtcactgagttacaagccacactcaatccctggagatgctgagtgctgttaatggacacgtgatgccggctaaataaaaatgattttcaacctccagaaagtatctcagccgctcacaaagtcatccactgtgtctcattgtatgcacgtcttgttagctccatgctgttcttgatctatagcatctctgctgcctgtgcgttgggaggcagacacatgtcagaaaatacagacagggaaactggaaaatgccagtgccagcaggggctccagtgagcatcctgcccaacccctaccttgtctttatttgtttttactcctgtaaacactggcacagaaaggtaaaacaactcgcttgaagtcacacagcaaataagtggcagtgttgaaacctgttagtgctaaggtccagaaaagagttaaataaatgtttcctaaaatgtatttctagagagcactgctctttaggtaccgtcgaatccgtgttggaaacactatttgatatgatgtgcttggagggggcacactgcctatcagcatggtagaggctctgaacaccctgcagtaagggatcctgttgcattctgtttaactagtgttttccaaattcatgtgcccaggtaacttgcccttccttttcataaaaggccatcctaaagaattagttcctcagtacctaaacttgaagtaagagccagcctttggctttgtctgtatagttgtggcattgtggagggctggggtaaggggccaggtagggcaggagtggagagcagggaggaggcttggaggccttagagggccagtggcaagaaaatcaacactggggaagcctgggcctgagcgtttccttgatcaatggctttgcctgtttgcagacgcataagagtgccaggccagaggaggtggcttcagggtggaccctgacacctgaaggtgaaatctagtgagttccaggctactgtcaagatctagggggaaggggtggggttccaaaggggatgggcaaggtagggctatgacttcaaggggcaagcagttgacactatgtggacagtgattctctataaaaaggggatggcagagcatggaaacaggactgaactcccacaaaacagggtggtggcaacattaagggggcatgccctctaggaaggcagtggggacactagggagatgttcctgctgtgtctgagtaccagtgccctgggggacagagacatcccaagtacctggggttctgggcagatgtggagcaattggatgctcaacttctcctgggttacacctctggggttatacccgcatttggggcataataacctgcaggcccagtagagctggccgctagcttggagcaaagagggcttccaaactccagggaaagggcaagggcaattagccagtccatctgtgcttccaggagaatggcagattatagctgacagattcctgaatactcattgtcaacgactggagtagacctgtgtccaggctcacatcagggcaggaacccagaaacccgggttacaatcccaaccatgccaccaaacagctctattttcccatgaaatcagttcttctttttctgggtcccagtgtccgcatccttaaaatgggttggcctcaattatttcttgatttccttcgataacttttaaattctctggccatgcaagtcacccctcaactgatcttctgtctgcttgtgttacaggttccacacatcactgttccttcttcttttgtagatctaaaatgagactcttaccctagaattataaaagagaaaaatttttacaggaaggcgcatttaagaaaattttcaaggaaggcacatttgagaaatacagcttgcctgggaagcaaaattgataataccttgtgattcagccacacttggcttgagctcagcaagtcctgatgcctccctgggcatcagctttcccatgagcaaccatacaaggtaattggaaacgtcaaggaagacaatgggcgtggaagtgatttataaagcatataccctatagtgtgctgtgcacatggaacggcgttggagatgagagaatggtgatgaagatgataaaattgctggatttttaggttaaaagttgtgataaacagacaagtgggtttattacaggcaaaatgctactttctctatttaatacctgtcctggggctattgctgctggaaatcaaagcaatactactgtcccaccccccttgcaagaaggaatcaaggaaggggttaagattatcctgatgtcaggtaagtcctctcttattcctcaggcagcagtgagtgaatcaaggattttcctgggagtcagggttccccaggaaaattaaccaggatattggctcacctcactccagtaacaaaggcaaccctgttgataaaagacggagccttggggtctagtcttctcaatcttatgcactctgttgctggcccacagaggctctacatcttaccttctccctctcctcctcctcctccaaatcaaaacctcttggagctcagtgagtggttggattaggaggaaaaggaccagaaggcagttcaaaaatggcactggactgactgcagttctgatcctagctctgccaccaaagaactccaggaccttgagaaagccacagtctttttctgaatcagtgttttcatctataaaacacaggattcagccctagggacactatcaactccacattccaggattaggatgaggaatgaggagagacattacaccacacccataatattgatctgagttcagagagcttgagacggaaggacacattgcagacacaccagcaacatgaagagaatggggaaggggcaaatgaggaaatgcagctggagctggggaggagatatttatgcttttcaagaggcagacctcagcctcaggacaatcccctaggaactgggtaaccagggaaatgggaaaataataacagtagctagcattaactgagcaccaagtttgacatccatctttccagtccctctccctgtgagttttcagaatttgtatctagatattcatcacctctttcttctctcctgggcatacttgtatggtactgcccacagctaaacactatttcagttggagtctaaaccatcctgactgtcagattgctatgtttctatacctggacactttactattgacttagcctgaaatcgtgttagtatcttttttgttgttgttgagatggagtctcactctgtttcccaggctggagtgcagtactgcaatctcagttcactgcaacctccacctcccaggtccaagagattctcgtgcctcagcctcccatttagctgggattacgggtgcgccaccaccacacccagctaatttttatatttttagtagagatggggtttcacaatgttggccagactgttcttgaactcctgacctcaggtgatcagcctgtcttggcctcccaaagtgctgggattataggcgtgagccactgtacctggcctgacctgtaaagagagtatctttttaatgtacttgttgccgcatactcctggtgactgttcagcttctggccagctactcagccactcctctcagatgtttctttatcattactgcaaatcagctctttccatcctgtccctgtgattgattcctgggctcagtatgtagaacttgacatttatctctgctaaatttcatcctgttggttcaggtccattgttcctagctgtcagagtttaaatctaccctatcagccttctcttccagctttgtgtggggctatgggggtgagggagtggagctggctgtggcagaactgagatgggtggctgctgctacaaggcatggctcagtaaagtgaagaaagttggatggggatgaatggagtttatggaatgggtctggctcagggctggtacagagcatggcaaatagcacaatagataacatttattatgggttggtcaatttgagtttggtgatagtgtacaaggcagttcaatatggtgggcggggcacgtgagcagtagtcctaggcaggtgtaacaccagaggggcacagcactgagattccagagggtcagagcaacaagagtgagacccaatcagtgactgggagaacagaggcaagagtccagtgctctggaagagaaagagcattttcaaggactaggcagggagttaacttagacccctttctctccttcacctctcacacccaatagaccaccaagacctgctgatgctaccatacaactatcttgcagttaattttctttccatactttgttttatctccagtttaaacattattgtttattgccaaatctatagattactaactgatcttgcattctcaatccctcccgctgtataacgcacaggatctttcaaatttgtgtctgacctaaacctttttatggttccccatcatcggtagcatgaagcacagactcctccccatattgcaaagaccctctgtgatctggcttctgccatatcctcagattcaacttaagcttaatctattccaagtgagttgcagacatcaaatcttctagcctcctagtctcagcacatcccgatctctctgcccggatcgcctactagccctgcactttctcatctgtgaactctcaaccttgctatcctagtcctgacatagcctcttaagggaagcctttcgggagctcaagttccaaagcctggctaccccagcaccagggtgagcagctctcataactcattatcatgcattttattagagtttatttgtgtacctcccttactggacttcaagctccttgaaaaaagggattgctttttaaaaatctctgcatataatatgtgatcagcaggtttttgatgagatggacatgaatatcaaggtttccatatctgcagtctggggttagggcagagtcctaggatactgggatataggagtaaaagatagaaatgaggctggacaggctgggtgtggtggctcacgcctgtaatcccagcacttcgggaggccgaggcgggcagatcacgaggtcaggagattgagaccatcctggctaacatggtgaaaccccatctctactaaaaatacaaaaaaaaaaaaaaaaaagaaaaaattagctgggtgtggtggcgggcgcctgtagtcccagctactcgggaggctgaggccggcgaatggtgtgaacccgggaggcggagcttgcagcgagccaagatctggccactgcactccagcctgggtgacaaagcaggactccgtctcaaaaaaaaaaaaaaaaactagacaaagacctaagtcattagggtgtgtgagtgtgtatgtgtgtgacagagaggaagagagagaatataccttgatctctaagcctgccctaggcatcaatgaaaaaatatgaattcccttgattagcactaattatgggggtgtgtgtgtgtgtaccgtgtacatgcacacaatctgtagtgtagcattatgagaagaatcaggcttttagaatcaggtttattgaaaagaatcactaaaccagggtatactgtttctgctactttgcacccatgtgcctttggataagctcatcgatctctcggatcctcagttttctcatatgtaaaatggggctaatcatgtctgtctctgagtcaatgtaaataaaaaaacacctcaccctgtgcctggcaagcggcagatgctcaataaatagcatgcacttggttatcgtggttggtccactgaggaaatgtaagcccagcacaccagctggactaaacatggtcttcactgcagggaggctgaatgtcatcaaaaggctcttcaggaaatgagagcagaggaggagacaggatgttaacagcctgattcattaggaactcttcctgtagtcttcactggggcagggtcaaggggccgggaacacttggacaagctgctcggcacatcctcttctgccacaggccggagtctcactcccaatacctgatgctctatcttccccctcaggacaatgattctattagtccctgaaaacagctctgtttacaatgctgcctcatgacaggcaggagggcttccaagatttcagtttatcttccattagctgctttttaaatttatgccttcctcccagagagggcccacagactctatgctgagatacagagacagccgcagcttggccttatcggcaagcacaccgataaatcatcgctctgtggtttcatcctggggaagtgatacatctcatctcattggtttgtttcccaggctgatattttctgatttcctacctagactctgaggtttattctatttggagtttgcatcctcttatgccaaggatcagcaaacgatttctgtaaaaggccagagagtaaatattttaggctttgggacacctatggtctctgtcatatatgctttcattctcatcgttttctcttttttttttgttgcaaccctttaaaaatataaaatggctgggcgtggtggctcacgcctgtaataccagcactttgggaggcagaggcaggtggagcacaaggtcaggagttcaagactagcttggctaacgtggtgaaaccccatctctactaaaaatacaaaaacttagctgggcctggtggcacatatgcctctaatcccagctactcaggaggctgaggcaggagaattgcttgaacccagcaggcagaggttgcagtcagccaagatcgtgccactgcactccagcctgggcaacagagctagaccctgtttcaaaacaaaatatatatatgacatttttagttgggattgtataaaaatatgccatagtctgaatagtgtcccaaatcagagggccacagttcgctgactcctcacatcattcactaaataaatgcaatcacaaacttattcccctcctctaccttttgccccatttcctgactcctcctccctctcctcccttttccatcttttctcttcctgccctcccctccccgcttcctcctccccttcttttacttccgtcctcttccctccatgcccctcctcccttgctcccttcttccttttcttctttcctccttcagcatttacagagcatttactaggtttgggggtgctgtgctgtggctcagggatataaagatgagtacaacaagagccttcttctcaaggatgttccagtatttgaggagatgaagcctgcaactgtagacggtcaagtgtactaacaggaatcacaacctgtctgccttgacactgtgtgggcagtgtgacagcgttatctcgggctaccacctgcaggccatggaagcccagtagagagagaagacagagcctgcctgcctagggagggtggtggccatcccagggaggtggggccagtccaagttggacctcaagcaagagtttacctcatagtgctttccatgcagtggaaacatttaagcaaaagggtaaaggcaggagagtacatttgagaaaggcattcctgagaagtcaggtggggtacacagcacacctaaaagtggaatgatgtggcaggtaggagcttgaagagcatttactaggtttgctcaagcttgaagctgctccaggctgccttcagtttctgggtttatccttccaacctggcactgtctcccatgcaaacctcctatgatgcagacccctggaatagctcccatcactcaccagcaccatcatctccagaaaaagccctgtcaatatttacccatggaagggtgacctcttacttctgaggagttttggacctgaatggagttcagttgacaaactgtcagagccaacctccagagctggagttggttacaatctcaatcctttactcacgtttggggatctttgggccagctccttaagcttcccaagctggtttttgttaagttataatagtgcctcccataggaatgctgggagaaagatgtgagttaatgaatgtaaagtgcttagcacagcatctggcacagggtaagtgtctggtaaatgtcagttgtttctatcaagagaggggaggaaggtaggacggagggagggcgggacaggatgctggggtcagatcacacctgcctagaactgactttggactttagcatgtaggtaatggggaccatttaaaggttataagccaaggcctcagatttcaccccctttaggctctaacccccttttagactatggacattggcaaaacctatggggcaggcttcataatgtccacttcacagatgagtcaagtgaggcttagggagcttaacctcttcctcaaggccaatcggctcatctgccgcaatcccaagtctggtttcctgaactctgtgttctatgctcttccctcccacactgctcgctaacagactgacagacggcatcatgccagccttgcccaggctccagttagcagacaaatcataactggctggcggggctgcgtgcctgctgcagttgtgtttatcattcatcagagaagagaagcaacctgccaggccggcaagtcaggccccgcagagagaagacttaaggtgatgtagcctatggggctggtcctggggatgaaaatttggattgttggatatgcttaggaaaagaatatttcagcaattcactgaaagctgaatatagcccttgcccagggagtgctttgagtacttaaggaactggtgaaagcaaggctagactgggagccaggaggcctgggttctgccctagccttgccattacaataggggagaaagcacatcttgttttaatttctggatttcagagtcctactgtgtaaaaagaagagtttgggaaaattcagcttaagagtagatagtactgtagtggggttatggaaaaattctgttcccttctctttaaatagccctccagagggaggtagtagctgtggggtagcacagagcagtgaagtgagcatctatctgcatgtgagtctggactttgcctgtaactcactgtgtgacctggagttttccagccctgtctcagaacctgagttcttgtatctgtacagcaggtgggttgggccagagcagagatctctaactgatgacctgtgagctaaatctgacctgtggatgagactcatttagttcccagacagattcatctttctaattattacccatttttttaaagtgacccaacatttaaaaatcagaagaattcacatacaattctggattcctaagttttcttgaaaaagcagagggtagcctggcatggtggctcatgcctgtaatcccagcacttggggatgctaagggtgggaggatggcttgagaataggagtttgaggccagtatagtgagaccccatctctacaaaaactaaacagaattagttgggtgtggtggtgcatgccacacccaactaatgggtgggaggattgcctgagcccaggaggtcgagtctgcagtgagttgtgatggtgccactgcactccagcctgggcaatagagtgagatcttgtctcaaaataaaactaaacattaaattttttaaaaaaaagaaacaaagggcttagtcacaccgagcccccattcacactgggagcacacactggcattgttcctttggactggtggccactgccagttcccaccattaccacccagtaccctgggctcattcatgtcaccagcttgtagaagcatctgagagtgcaacccctgcacgaggccttgtgaacccacattctctgcccgtagacatgaacatgtcaccctgctctctgagacagagacccagctcctcctgggggtcatgcaccctccgcagtaaggccgtagagtctgttgtctgcatccccacacttgcttagatgactgtattacagcacacagcaattattacagattttcacatgtacatttatattagtgtagcgaacatgctttttcaagctactgcacccttttggagatgctgagccttttcacagacgggtgcccaccccacccaccccatccatgccccctccagctgtatggctgtaagactctgtggctgtcaccctaattcttggttcatcggccatacccagagtgttcagtcaccatacaaaagcaggatgaggacacaccaaactgacaagcagtgactctccaatagagggtagttcctttcctggatgctgcttttatttctgtcttctgctcagtctcttttggctttagacacacacccatgttcttggaaactcctttggataatggctgccacctccaactcagcatgtcccatctagactcatcatcacttcccctacctctattcttgctccttttccctagttctttatttcaatgactgggcaccacccagttgccctagccagaaaatggggagtcatcttctatttctccctttcactcatactctaaagcccatcaaaaccaacctttggtgattccaccttttcgaaggtgcccacttcctccctgtctcactgcccacatccaagtcaaggccattgctgcctctggcctggactcctgccatagccagagaacttggggtccccttattcatactcactctactaccctccaatcccattgcacaagccagcatggtctttgaaaaacccaaatctgatcatggcagcctgtatttaaaaccttttcaacacttaggataaagacccaagtccctaacaaggcaggatgtgggtgctctgtatatagtaggtttggaggcatcctcacttgccacgaaacccacagtcaccaaaagaaccaagcctggggcttccaggaagcagctcatgtggtaatgcaaaccacagaggtcaagagggctcttagataccctcacctagggctgcccagcccttgtcagtgcaataaggggaaagcacatcttatttttatttctgggtttcagcgtcctgtgtaaaaggaggagtttgggaaaattcagcttaatagtaggtagtattgtagtgaggttatggaaaaaatcatatcacttttcttcaaacagtcctccaaagggaggtcttaatggttccaggagctcagtctgaccaagataagggtgaaactctgcagtcactatctatgctgaaagagaagcatctttcagtgctcctcaagatttcctaaaaagtcacctccagaggctagagcctggaagaattggcaaaacatgagtcatcattattttgacttgaaaggagggacagaagcttctccatggaccaggttccaaggctagttggtcatagctgtaggcagcctgtcccttagcatcagttgtccttgatcttagaaacttaagactgagaggagaacacttctttccacttattattattgctcccactgggtactgagcctgcagagttatagtgtgaagagagatgagcatttagaaaaataaaaggagaataagaagatgaatgagtctcagaagggagtgaatccaccagatttaaaaagagaccagggaaaagaccctagtaccatcacgtctacactcctgcttactctagctaggcccaagcttgaagctgctccaggctgccttcagtttctgggtttatccttctaacttggcactgcctcccatgccaacctcttatggtgcagacccctggaatagctcccatcactcaccagcaccatcatctccagcaaaaggcctgtcaatatttacccatgggagggtgacctcttgcttctgaggagttttggccatgaatggagttcagctgacaaactgtcagtgccagctggtagccccagactctgtgcaaactggaaacctgaaggccagggaagggaagtgacttggccaaggtgaacatggtgaacttggctcctggaccatgtatcctgttgtccagtcttgtgctctttgcattatacgaaatagttttattgatcattctacaaagtaacggaattttcaagctaaattttagcatgggattcttggggatgggtataaatgatgagggtgctggcatggcaggactgctgtaggaagaagagaaactaataagagtaagagtagaatacttctgttgttctcaattgcactaattttagcttttattttcattaaatcactctcctgtgttgttttgcatttattttatgattctttatctaatttcttaggttgactacttagtgcaattattttcagcttttcacaagaaataatagaggcattgagtgctataaaatgtcctctgaacacagctttagctgtgtcccataggctttgatgtggagtattctccttttcattactttctagataatgcataacttctgtttttatttcttctttgagccaagaattacttaggaaagtatctcttaatttcaaagtagttaagagttttggggccattggagacagaatgaagaggagttggctccaaagaagagacaagcaattaaagccaacttcccaacttctgtctggtgccagctaggttgggcatttttgtcctgtcttcactgatttggggcagtaagaggtgagaggaagttggggaacaaaaccccatgacgtcctcagtttagtgtctgttctccttcctgccactcaggctgtgaccaaggggactgcttcctgctctgtcccctacacttggctcctgtccttgcccaggttcaaaggcggcaccttcccagaaggctcactcccatctgtagctggaagtcacatctgctcagggctgtttggaggctgccttctgttaggcacagacctgtgccccttccagcccccagctcaggggtgaccttagacgccatcataggtgtagggagggcaccaacactgccctcacataatcggatcaatgaatatgagcaccagctgtgccagacacactgctgggggcatgacacatggaacctcgtgtacctcgtgggtagacatcactcccatttggcagggatggaagacaattcccagctgtaggcagttttctcaggtacacagctgggaactggatgcaaacacaggtttctctggctctgaacctttgccttcatgctgcatgctctagcctaatcttgaccacctgccactcctgactcagaattttcagatgagagaactgaggccctggatttcaagggacttagctgtgcatgacacagcaaggccccaatgaactgaaatgaaatgcaccactgagaagcacacgttcatggccctgccttgctgatcctctccttcctccatctccccatcctctcttccacacccccctcaacctcatcgcggtccttgccttcctaactggtaaaattgagaaatttggggggaatgtgggaggaattaggaacaggccaaaggggaggggattgtagagggaaagcattgtttttggacaggaggccaacaagacaaatggactcctacattccgagcatttcagagccacctgtttggacttctgtcctgcccttattgatctttccagggcatttccccagtgaccaagaattacggatctttttctggaatgggatcccataccattacaatagatcatttaaggacttttatgaccgtgctgctaggaactaggattctaaagtttaaaaagatcacgtggtcttggaaaggcagccttgtctgtcctctacctcatgggctactccaccttcttccctgattcatggctttgctcactctctaaatcactgactttctcggccccttggctgtgtggccatagagaagctgctgggccttgaggagtcatcccgtgttatcccctggaagcaggacctcggtcctttctcccagatgttctttctcacctcctgccaaactccgtgccagccctcagcaccacagcctgagaagtcatgctttcttttgtactgtgtccacggatatgtgcccagcctgtcataggtgccagtaagtatttagtgaataaaggagtaaaagaatgaatggatccatcatgaattatagctgcctagctggcacttggtggatggggcaaggagggaagtgcacagggcagaggaattgctccgtcgctgttcctgaagctctggggttgggaggggatggaggaggagagcacattctgtcccaaacccctctagattcccaggacatacccatacactccagccctgcctagtctctcccaaccagccttggctggctctggatcttcctatggggcgctcaggtgggcctcagaagtagaccctgaggcagccatggacattcacagcctggtttattcagcacagctctggcaccaaactcactccatggcctatgggtatttcaggcccatgggttgaacctctctcagccctgttttcttctctgtaaaatggagatgagaatactcacgtgttctagtaggaataactcaagacacggaatgtgaagtgttagcagagtgtccagtgcctttgagtgcctctctcctcccttctatttatttttaaggctactcatcctcttccaggccttgtctgacccacggcttctgcttccttcccgcatggctggggctactggatccttagctgcaagcttagccctgcccgtggctcctaggaccaatcctgaggcttcaatagtcccagatgcccactctcggacttggcttgctattcctgtcctgacctccgtcctgttctgaagaatgcagaggccgggtgcggtggctcacgcctgtaatcctggcactttgggaggctgaggtggatggattgcttgacctcagaagtttgagaccagcctgggcaacatggcaaaacccggtctctaaaaaaaaatacaaaaattagctgggcgtggtggtgtgcgcctgtagtcccagctacttggggcgggggatggctgaagtaggagggtagcttgagttggagaggttgaggctgcagtgagccaagatcctgacactgcactccagcctgggcgacagagcaagattctgtctccaaaacaaaacaaaacaaaacaaaacaaaacaaaacaaaacaaaacaaaacaagaacgcagagcgcagtgtccagctgggtggagcccagaactgcagagatgtgctgaaagatactcccgaggccaccaccactcccacattgccttccttcttcacacacaaccagaacgtgcagtttgcatcactcacatagaaattaccaaagttattaatcacagcgtatgagtgtgtgtgtttgtatgtgtgtgtgtgtgtgagtgtgagtgtgaatgtgtgtttgtaagtgtgtttgtgagtgtgagtgtgtgtgtgtgtgtgtgtgtatggaggaggggtggtgatgctgttgttgctccttcagttacagtaatggcactcaacctaactacacattagattctcctagaaagacttgaaaatgccgatattcaggcagaagttttgatttcattggtctggagtggaccctggacattgggaattttattagtgctattaacacttccaggtaagtctagtgtgcaactggtgttgggtacaacggaacaactggtgttgggaactgatgtgagctcgctgacatcagggatttggctttatctattttgtctccttggaggtgcctggcttagtactcagtgcctgtaaatggatcaggagtccctgtctctgggacactttgcctgaccaccctcctccctcccatgcctgggctaggtgttgtgctcttattacactgggtttgatttcctgtttcctgtctgtctttttcaatagacaatggactgccctagggcaggatccagattttcatctctggctcctttgtcaaaaccctcacacatcagaatgtatcggtgccgcatgggtctgaggacatcttatcccttcttttcagggtccctggtagttaacgaagcctctcttttcttctagatgttgtttctttgctttgggaaatggttctcaaaccctcataacctctatcttagttataccttttgctgcatattattattattattttgagacagagtctcgttctgttgcccaggctggagtgcagtggcgcgatctcagctcactgcaatctctgtctcccaggttcaagtgattctcctgcctcagcctcctgcgtagctgggattacaggcatgcaccaccatgcctggctagtttttgtatgtttagtagagatggagtttca[133 bp omitted]agcaatttataacaaatggtttctgtgggtcaggagttgggagtagcctagcggagtgattctagccgaggtctcttgtgaggttgcagtcaagatgccagctgggggctgcagtatttgaagacttaactggggttggagaatctactctgagggtcaatgcacacaagtgagagagcactcaagccagaggccacagtcttttaaaatgcataatacaggaaggggaacatcacacaccggggcctgttgtggggttgggggaggggggagggatagcattaggagatataccaaatgttaaatgacgagttaatgggtgcagcacaccaacatggcacatgtatacatatgtaacaaacctgcacgttgtgcacatgtaccctaaaacttaaagcataataaaaaaataaaataaaatacataataatcacttccttcataggtcgcctagaccaagcctgttgcaatgtgggtgggaactacacaaggaggaagaaccatgtgttggagtgtaacgaccgcaggctgcatgctgggagctggcctggaagtccagagagggcacccagtcctgatcccagcctctgatcatcatcctcttgaacacaaatatctatttgcccctctgatgtgcaggaacagtgcaagagatgagtgtcatcctggcctctttttgatttttttggagaagggctaatagaaaatgtcctcttggctatcagtcctgagctcctcaataacgcctgaactctgtagaaatttggaaattgaaacctaagagtaagctctagaaacagatacctccaggatgtgagcttatttttgatagccatggcgtttgaagccaatggaagtgcgggcgaaggagagactgagaaatgctgcccacgtgggctctgaaaaaggctaaggttggtggagtcccagcccctgcatgatgtggcagggggcaaggccaaacttgccatcagctggagctgacttcctgagggaggcagcaggtgcagtgggctggggcaccatgagcactaagctccatcagatctgggtgggttcctttcctgcttccatttgccgtgtggcctccaccagctgttctctccctggggcctcagtttacccatccataaaatgaattggttggactgatacactacttatgaggcttttaaaaaacaatagcaccttcattttccaaattacaccttacaacaaataaagtgaatacaatgttactgcctcattacaatatatgagataatattatgaaagctaatatgcaagaataaatgcttagtgtgttcctaaagctgttcttaaatgctttggacacattaactgatttaatcccacagtggccctgtgagataactactcttttttttttttgagatggagtctcgctctgtcacccaggctggagtacagtggcgtgatctcggctcactgcaagctccgccttccgggttcacgccattctcctgcctcagcctcccgagtagctgggactacaggcgcccgccactgc[184 bp omitted]gcagccacagcacagagaggtgaagtagcttacccaaggtcacacggcttgtaagtgacttgaactcatggagggaggccataaggccttgctcttggcccttccgttatacaaatagaagcagagcggctctggtggaagtgagggaggaatgctggaagccgcccagcttgttacccttctcctttcctctctttccactgagcacccccttaaacacagttggcctcgggcttgtggggcagcttttgagctctgacatttgacgagctatgacccccgtatttctctacctaggctttgcaaacacatgcacctgaaccatctgggatgctttattcaaatctggatttctatgccactttccaggttcatgggatcagactctctgggtagagtccaggagtctccatgttaatcagcgcacaagtgggtctcggctcactgtcatggaaaaactgctgcattttgagcaggtaggcagcttaatcaccaccactgggcttggaaaggactggatttagcactttccttagggaggaggaggaggcctccttaaggaaggtctttttaaggagagtgggaataatctctgtgcccaggcactgctagaccgtctgtcaaacttgacctcacttcaggccacccacgcaggttgctgtaaccgagagtgagccaggaacttcaactgaccaagagcaaagcctgggtcgtggtcactgtgacattccaggccacagttaatcagcacatctgtgaatgcaccaggtgatttcagaacattttttatgcttcagagagaaaacaatttttatgactgttcagtacagcccaggaatcagagaaacaaatgctgttaaacattcatgtgttaattattgccattccttgctattcctaccatccaagagctgattatgagcagagggtatctttgcaacgagaattctggcttattgtggcccctccccaggggcctctttggctgttagatttgggggagggtcattaataaatgcattgtagtcacagggtaataatcctgttgtgattagaagtatagctgttctacttgaagaaacactgtccaggcagaaaggaatgaacaaggatacgggacagaaagacagggtcagtggggaagcatgaaaatcactcgcgaattcattcttgtgtctgcacctgcagaacatacgctctttggccagtgtttgtcacagctacaccatgctctagcatttactcagaggaatacctggtccagtggttaactgggaggttgtattaattagtatgcctaactatgtccaacacacgaggagctggaaggatagtttggtgaatggccacctgggattaatcacccagtccagtacagtcgtattaatttggtgcccagcaatgttcagcacacaaggagcctcaggagggacagtttggagagagaccacgagagggcggcagtgagcccacagtctggctgatccccttacccacggacagggcccctcttggggctatgaagggtggaggagcaagtgagcggccccaaagcttaaaactttatttgcttcacagcaaatgtatccctgggcctcacctgtgttcctgtcttggagttctgagatagcagggagttctgtttctgggaatctgcctcttccccagggggaaatgacaaagggtattttgaaattgacattcaggccctggggttaagcctgtggaaccagcaggctaggggatgcttgcctcacctgcctgggtgtgtgggtgctggaatcatgttggactactttggaaaagcaaaaacttcgaagagaaggtactgatgttggcattgctggcttatggcagccaggagtctgaataataataattattattattatttcataacaggcaggcaggaattctacagacaaggttcaataacctcaaggcagtctcgtggcgaactggcagattaggtctcgggacttgggactcaggctgggctgggtccacacagcactttgcctcttgcgggagaagtagcaaataaaggcctctggagctgggtaagcaggggctcaacactgtcgtcggccaaggggtatcttttgaaggatgcaaattagctgaaattgaatgaattatttggctctgcagggggaggtgggaggtaaagagggcccctggataatgcgcctgccactcggggccagccttgctgacagttattcactctgagtgtggcacacagggacacaagaggtacagcagccatggtgactgtagggcagggatggcccagttctgatgcggccaacgcccccgaagtcctggagacagaagtagccacatgaccaaggagtcagtctctcccagtgggtacacagagcagggtgcacagcccagctggggtcccgtgagagcctgctgagagtctggcagagatgggcaaggaagatgttggatccgactggcagagctggagggactgttgagaatcttctagtctacagtgcgggtggatttgagttctgggaggggaaggaattgctcaagtcacgtaacctgatggcactgctaggactggagcccagcattcatgccccacggtcatcatctaccctcaaaggccataccttgcaaaacctcatccccgctcctcagaaccctgatgtggggcctctgaagacacctgacaagaggggacccaggctgttcctctgggtgtgcatggcaggcaggccccttcccccatcacctggcacctaggcgggcagggaggccctctggcaactgcgggcagtgtggttcagccagggctagggggccctctgctgggcagccgctgcctggcctatgggatagctgagcaaagccagctggctgggtgggttccggggctgcatagaggagcatcctgtcaggaagggtcagggatggcaaaattctgacccatggcacttctttgtcagtccccccactccttcctgtcactgctgtccctaccaggcagccttgtgccctctgctcagtaccccctcgtgggctccccaccagccccccaaacctccagtcctatctgctccccattctagctcctgctaatatgatattgaatcttaaagggtcaatgaattatttcccccgttcctgaaggcctacatttgcagagcattcggactcctctgagaaaccgagtcttccctgcaggagtgagctgaaggcccaccggctcctgctgtgggctgaggcccacctgtggggggccctgaggtgtctttgtaggggcagcggcttggcagtagttctgaccatggttggaatcctgcccctttctagttctttgactttgagcaactcactaaacttctctgaccctctgtttcctcatctgtgaaataggaacagtaattcccgtctcccagaattgccttgggtgctaagtgagaggacgcagtaaagagtccctcacaggactcagtgactatcagtttctttcattgagattttcagttttctcatctgtggaataagaattcttgtctgccctagattataactttgaaaatccaagtgttttgaaaatccaagtgttagttttatttgcggtgccatgaattcccacaagaacagacacacgagagcgccacctccagtgcagacacagacactgaagccgtgtggcatcgcaatatccctgaaaactgcctcccgctctgcaccgtgcagtcctggggctgcccagaacaaaggccagggcaacccctggctccccctaccccacccaccgcaagcccaagagagatcagcacatgatcaagccaggttgcaggaaggaaagtgatctacacagcaagtgggtgacaagaagtgtcaggacacccatcttctgagctgggcctcaatcttctttttgcagattcttctgtcttaaggaaaagacccttctcttttctcttcgttctgtgatgaaggaccctagttctgaggtcaaattccagcaatggactcactgtctttgtcatcttggtaaagtactcagcccctctgaaactttgtttcttgatttctaaaatgaggatcacaaagccatctttattttttatgtatttactttttgagatggagtctcactctgttgcccaggctggagtgcagtgacaccatctgggctcactgcaacctcctactcccagatttaagcaattctcgtgcctcagcctcccgagtagctggaattacaggcacctaccaccacatccagctaattgttttgtatttatagtagagatggagtttcaccatattgcccaggctagtctcgaactcctggcctcaagtgatccacccaccgggactcccaaagtactgggattgcaggcgtgaaccactgtgcccggctaggatcataaaacctcctgcagagggttgcttagaggtttaagtagcataatgcattcctggctcctagcacagggcttggcttctggcaggttccccttcccatgtgaacactgactcagaaaatgacactttcccgttgttataaataatctcgaagacacccagttctgtgctctgtctctgtgcttggaaaggccctctgtgctcactctaccaactagtcatctactcacggctgatgtagctccagggaggggaagctcacccttcactgggctgcaatctcagaacagctgggacggaggggaagttcctgctctcatgatgtaagtgctgtctccatgcagttctcatccatagcatagcctcaggaaattgatctaatcttgctctaaatcaactcttcggatgacccctgggccttcttgtctctttcagtcatacactcaggggtcagcctcaaccttctccagctcctctcagctttgagcaggtatctttcactttcaggagcaactcagcatgcccctgggccaatgctggtgtcctagtctggctgggctcaggagtttctctcaccatccccaggctcagcctctgagattctgcccagttcttgctaatccctgcctccaaattctttgccctccagtcagaatgtgctgatataccgttgttgggttccttatatagagacactgtgcatagaatcccctttttagccttcccagtacatcgtcagggtaagtattattattcccatttcacagaggaggaaatgaagcctctgagagattggctgacttgcccaagattgcatagccagcaaattgtgaaccagaagtgggagcttggtctctttgattggagttgagagaatgagttctccccatacaggtatgatggaaatgagaatttatgtaaaacaagaaaggtggtcttttaccagtattgtttctgtatgttctgggtgaagtgtagactcattcggaggtgtgcactgggagggggtgtcacagcttgttaggtgtatatgcatatggctaacgaggatggtggggaggtgctggcttggtgtggcagcttagctgagttgggtcatgctgctgctcacgagaatgaggtccccagtttgagtccctccacctccatccactcacctgcctcccaagtgttatttatttgtttgtttatttagagacagggtctcattatgttgcccagactggccttgaactcttgtcctcaagtgatcctcctgcctcagcctcccaagtagtagagactacaggtgcacattacagcgctgggcttcctcccagatgtatttaacttagtcataagtgagtccagctgagagtgtagacagtgcctagggagcccagcagctcccttgggaatgtgattccagggcacaggaaaggccaaaggtccttgtgaccctcaaagtctatcttcattatacctacaatatgaatcccagtctcttctgttcccccatcaccgatacctgtgtcattcctgtctctgtgctcttattcttgacgttccctctacttgggctgccttcccctcactgagtcctgtagtcagcctcagtcatgtgcatggaacaggagggcatgctggctgagttgtgtgcctacatggctagactgcgcaacacttcctagcattccctgccaccaggtctttctgagtagggcggacacgagagagtcatgtgggaggtgtggagggcagagtgaagcagcccctttgtagctcacatatcttgtcgcttagctgctggctgtttgtgtgaggctaccactccaccaccccttggaaatatctacagcttctctgcctcctggccagatgagtgagctttgttctgtgatgaaggaccctatcttctgcaggaaaccctcaccgtcaaggtcagagcaataaaactgacaggggtcttagtccaacctggtgtaattccagctcgggctcacgggttctggcttatccttgttatccctcactttatctccatcttcccctccctacctcctgccttgcagacatggagatccagcatcaaatgcaaatacctctgcattacctagacggactgaccagctcccacaatagcagaaggtcaagtgtctgtaacaaatcccttattatttatgtatcttagcagctttgcttttcttactgagcttgaattgtggtatcaacatgggtggtggctgatggtggcctatgactcctatccatcctttggagcccagctcaagactcacctcctccaggaagctttcccagaccccactagtcatcagtggtcacttctgactgagctattacagcatttactgcctgtcctgctttaggctgtaagttatctttccactcgtgggtatcttcttgtcctaggtcaaaatttcctgcacttcacagatacaaatctctagtctcttcctgaagattctgattctgcgagccttcacctagaataatatggtgaccaaaaagtgtgaggaattcagccccaagtaaactgtgagccctaagatgacaggaaccaagtccctgttttatgtgtcagggacttcacatatccagcaaaaatagtagatttgaaagtggagggtacccaaccagccttttctggagcaacatcctgtcttagaattcccattaagtgagatctctcagacgcttttctttcttcttgcagggcagcagaggatgaaaccccaagcagtcaggtgctggggacgtcattcatcctgatgatcctgatggggttaattcttactagtcatgtctccctcactctgatcaagccaccctaggactccttctcttctattgctttggaaggaggactgttctttctggctccaggagtccacctcccaatctcccagcatgtcccccggagctgagtctgacagatccaggctcttctgctttttctttggggctttctctccacttgtttctcttatacgttctagctcaaacctatgcccaacacagagtaggcactcactaagaatgggtgctggattgttcatcatcagggccaggttgcctttgctgccctcatcaggcccttatacagccagggcattggtggtactctgggcaggctatgagaccctgcttgcctagcatctgagagatggaaagtccgccaaccagacctgggctgcccaccccttctcctcccctccccagaaaaccccagattccccactgtaaacagttctgtgactgtgtctcctggaaaggccagatctgatgtccatgcaggaagctttgtaagaattcctcatggtcgaatgcatctgttccctaatcaaaacacaggcagattcctcatgctgggccttaatttgctgaacttgcacataattgagacagattatctctattttccagctagtcattttatatttcgggggtgatgctgggctggctcaggatgtttctggtcggagcccccatctgctacctgtgcaggagggctgggcgccctgtgtgcctacttccttctatgatctaacaatagagaatgcatgtggatgcctggtgcaggaaggaaggagaaatactgttcttcttcagatgtgtgtgccagggaggaggagatggacagtagggtgcactgtccagtgggcagatctaaggaaagagaatttcttacctgagtcttcaaggaaagccagaatcagggccctaaacccattcaaagaccaagcaacagctaaaggctttatgttccacactggactctcagaagtagctgaaaccaagtgactcttaccagaaaccaactctggagtagttgccttgctcgaagcctaatcaactctgggctgagaagaaaggaacacacgtggttcctttcccttccacatgaggattaaatgagatacatcagggtggcagaggagagtgctccagtgggtgaaaaatgaccaggagtggggtgttgtgtgtcccactttatggaaatcatacttggaaaaactgaatcaaaaacaacaaactctgacaaagagggtcatcgtgaacaatgggaatatcaggaatatccctttaaagagaaccccctgacacatgcatggtatctgtgggcttaccagagttgcatttacacactcattttagggacatgtgcctaaaatgaagtacatctgttaatcagggtacagagaggctgtgtggtgagggggaaagaactggatagggggtcatggagcctggttctgccactttctcactgagagacctggagcaaatcactgtcccaatccaggcctctgactcccattggacagagggtaggactggattagatgatctttaaggccactttcgctttgacattttctgtaggaagaggaggaagaagatggaacttcatggaggccctactgtattgcagatgctcatttgacccaatgccttggtaaccccaagaagaagtcatgctcaaacaattaagcaatgcatccaaggtgagaaggtgtcagggccagtaagtgtcattaccacgccctcgtaggaggtggcagggaggattcaaacctgggcctggctgacccgtgtatgtggtaggtgtgtgtgtgtgtgtgtggtttccagctgtgatcctataggacaggtgaggcagggagccagtggacttgcagtactgcttctgttttaaattgagacaaagcttggggccatcacatgggcttcctgtggggaaaaagggaggccaatccatttaattaacaccccaccagacccctggaactctccctccagccagagcaccaacaaccctgatagcaactgggctgccccaccacaaacctttaagcaattcattttctacacttataataaataagtcaatgaaaaaaattttcgacataatttccccagagaatggaagaaagaagcagcatgaattggaagctcctattatcttctgttgtcttgtctctgatgacagataatggcggctggtgaaggggattggttggcagggagaataatgcttgggtaaaggtggcctttagaatatatcatcccgcatccaactcaaaaagggaagaaaaaagcaaaagacaaggcaaggctagccgtgctgctctgttcaggcctcccttccatctacatctagccaagttgcagcccctcttactattagaaaccattgcatgaatcaccctatttgctgctgcttttcccctgtgccttcagagagctgattaattggtccaataccagcaactcgtcacgaaggtcttaattaagaaagaaatagccaccttgtgaattccctgggcatcaatagccctggggatgtctcttctgcctttctgcctgctgctcagggaatggtgaggaaaagaggacagaggcaggctccgattcaatgggattacaatattggagggagtaagagagccaagtggccaggaaactccaggacagttcaggaggaaagaataatagagagtttggccaaatgagtcagcttccaaggctgaatccaactggctgggggctcccacaaggggagtgaactttggggacatcttgggtttggactaaatttttaagactagctttaaaaaggacagttaaaagtatagcaattattttcaaccctgactgccctgtaggggagcttttaaaatacagtgatgcccgagccccacttcactccagtccaatcagaatctccagggggtaggaaccaaacactgatgtattttaagagctccctggctgattctgtggtacacctggggctgagaaccaccaaggatggtacagagcgcgtttcttcatgtgtgctccctgggccagcggcatcagcatcaacatcacctgggagcttgtcagaactgcagaatctcagacaccaccccagaactactcaagtagaatctgcaagacccctagctcattctcattcacttccaagtttgagaagcaatagtttagacaacagattgtttggggttttatttggactccagcattgaggcacattactcaacttccctgaaactcagtttcactgtatgtaaaatgggactaatgatatgtatatgccacagttatcaagagaagaagacagaatcatttctgcaaagcatttaacacagtgcttagaacagtcacttctcaatagacacacgtggttcctttcccttccacatgaggattaaatgagatacatcatgtaaggcatttaatagagtgcttgcttgtactgtgtgcttaataaatgtgggctattcttatttcctcaagcattccctaggcagacagcgggactcctgcctttgtgctcctccggctcgctactcatccatctcttccagcccttggagtattgaatttcaataagccatttttatgtctctcaaccccgctgggtcttattcagctcacttcccttggcctagtacaaagtaggtccaggaaatacatgaataaatgcgaaggccataaagcgttccttagctggagaacagagaggccgggggtcacgtgcctggggcttccaagtccttagatgtcctgtttcttggcccttgtgtaagaacgaggctctctgaaggagaaaggggccccttccagtgtctgtgagtagaaagcaggtagcaaaatatgtcatggaatattctgtgtgttgggtcaatttcaaccaacacagaacctaaatgctttgtagacctaattaaactgggagcttctagaaaaataaaaccgactttgagattgtctctagacttcctttattcctagcatgcttgggctggaaaaagaaaaagagagagaggtcagtcccctttgtctgttatgccccatggcaagcaaggggaagtcttggcagatggcagcaaggccttcctaattcatgggtcaccctggagctgcccacagacactgccagaccttttaatgaaaccacttaattggcatgaacataggcgagtgtacaggtcacctttgctcaggtcaggggctcagatgggagcatgaggccttttgggcctgcactaagcccttttttcaaggagactgtgttgctgccaggctcaagagagaggtggttggaacctaaaatactgataaacagctcatagtcctgcctagggagacagaggtaggccagctttgccaggtcatgcaggaccaacctcacaggtaccaaggggttggagactgcctctcatagctttgataaaagtcaatcatttctattagtttatgcattcactcatttaacaaaaggttttcgagttcctgctctgtgttaggtatataaagtgcttttctgtacattgttccatttgatttcatttaattagacaagaacttgctgagttagctactatcttcccattttaccagtagataagcagagccttaaataagttaaagaaaaaaatatttaacttaaaaatttttatttattaaaaattaattactaatttttaacttaatttattaacttattgactaacttagctcaaaatcacacagcttgaaggtttgaaccctagactctgtgattcaggcctcgatcagtagaaagagtttacaggcatggcctcctggacctttaaggcaaacgttccagaaaggcttaggacaagatcatagaactcctggcagaaccaggtgccaccaagaaggagtgtgctttgtttctgtagtcttggggtacataaagctgggcagggggcagggggcagtgggtgggggttacaccaaatctgagctgcctttatctgtaccgacctgacatcttgagcagaccaagccccaggcagtaaaagtgctggaaagtcaagacacgtgggcctcaatcctctctgcttcttgagaggcgttcgaccttgcagaggcccttgctcttgccatctgggggtttagggccagatggctgcccaggtctcttagaattaggttggcctgattccttgagctgtggggttggtgttcctggagtcactgctaaaaattctgcaaattgcagggaagccaatgtttaaagacttctccatcgcacttgtggttgcatacatccacacacctcccagtgggtcacgacttcctagggcttatcccactgccaaggagagaggcccttctttcctccatcctctacgtccccaactcccagcttctttttctatcacctggggggtgcccataatctgtctcaagtttctgatggtgaggtgctcgaggttgggaagcgtttccctgactgtctcgtgagcagaaatgatcacactgtgttcccagccctttgttctccccttagcctcccactcggttttccaggtgaggtcaagggccacatggaaagggaaaaggtattataatggaagggatgcccaagaggagtgtgtatgggaagggttgagcgatcatactggacactttcaggtcttttttattggccatctgtcctccactttcttcttgcttccagggaggtgggtctgtgtctgtggctggatgcagtgagaggagccagaaccaacacccagtctgttcttcagccagaggggtgaggctgagtccactaagctggcacctccacggtttgccctcggcaagcgcctgatgcctaaccaacctcacccatgaagtcaagggtcattcatcaaacccattttcctaagcatctcctacatatcaggcactgtgccaggctgtgggaatgcatgatccacatggtccctgctcacagaatttacaatcttgtgctagaaactattaaactaataatgacacaaataattataaaataaaattgcaggaagtctgcatgtgtcagctcctgaccttccttctacttccaggactgggtttgattaaaagtgaggctactatgatgggccactagaagatctgggaggtgaaatccagtcccaaatctcctctcacccactgactcttgggacagcagagcaagtgaataggaaagaaaaagaaagaagatgctgtaaaaaggtggcttggagctggcaggtgctagtgcaatggatgggggaaaccatataatctgtcatttccatctcttccacgtcactgacattggtcctcttgaccctgtctcagctcagacctgcatcatcttttcacgagatgattgtggcagccttctgccgccagtcttgcctctcacccagcccaagatagcctcgatagaatcgatacaagtctgcagagaacctctcctctttctgcctagagcagtatttctcagccttgggactggtggcaatttggggctagataactctttgttggctggggctctcctgtgcattgtaggatgtttaacaacatccttattagtagtgacaaccaaaaatacgtccaaagattgccatatgccatatgatttgggaaccactggctcagagatattatgcccttgaacttgatattcaaagctctccatgatctgattctaagctgtatttcaggccgagtgcagtggctcatgccttaatcccagcactttgggaggctgaggcaggcagattgcctgaggtcaggagttcaagaccagcctggccaacatggtgaaaccccatctctactaaaaatacaaaaattagcctggtgtggtgccacatgcctgtaatcccagctactagggaggctgaggcaggagaatcgcttgaactcaggaggcagaggtggcagtgagccaaaaagagtaaagaaagaaagagcgaaagaaagaaagaaagaaagaaagaaagaaaaaataagctttgtttcagtatgctcttcctctgtcctgtctctcacattctattatgtagccataatcaagtatatgaaattttcttaaagtgccctacctttttcttcttgcctttggccatcctgttctcttgacttacagggccatgacatcttctctatctattaaaagaaatctacttgtgtcacaagattcaaataaaaggccttgtctgagaagcttttccagatttctggcatttagttatcttacctgtcaaataaggataaaaagtctgccccatggattgcctggaatcaaaatttcagagttgtaggagacctggggaatcaccaatgtcttctttcagggagatagacagaaatgcaaagaagtggattgtcttgcggaagtcatagccggatggaagataagctgcacctagaacttggtgttctaaattccgagatcaatattctaaacccacttgtcagcttttgcaagatgaagacactatctaatcaacaggaaagttaactttgtggccacaaggtcacaaaaactctctgcacctcaatgtttctctgtaaggtgaagggctaaaccagctgttccccaaaaatcattccaggatgctttgtgctactatgcttctaattttcttttgagaagattgtcatttaatcataagctattcttacggggaggtattcataatacttcccagtccatctcattgtgggggctggaaatttctgcccttgctacgatgctgtcaaaattgaaccccagagctcagctcccaagaaggttaacataatggttttgctactcatcgtaacaacacctcacatcatgccttcagatcactccccagcatcattcttcaaattcaaacgcgaaccagaagtgacaaatgattcttgtaatgcgctctttgacacaaatcatttctgattgctcgggaccccagacaaccttgagcatgcagaatcaagctgagagggagaagtcttagaaaatgaacagcttcaacttcttgccgatgagaaccctctctctgctcacgaggcaggagcagtatgtgctgattgccaaacagatcatttttaaaatgatgcagatctgtgggggattggtccgtgtggtgatgtgtctcatcttacaatgtcctatgcagccttcaaagcgtttttagatcctggcaaggaaacagacattcatgtgcgtagggtttgcaaggcctctgcatatgatgttgctcttcatcctcccagcaagcttgggtatgtattgttatccatcaccccataaaggaggaaagggagcctcaaagaattcctagaacattgccaaatgacctaacgtgttgctgttagatcttagactagaattcaggtcctgtggctccaaagccagtgctctataccgaggggcacctctaagctataaatccctttcaaagtgctcttactatttggcctcattctctgtgtatgaatgcttagaattgagagaagaagtgcacattgatgtgaggggggcttatctggaaaatcaggaggttggaatggatcacaaataatactcctggttcaaatgcattggcagaccagtctaagtgccttatgagtatcatttcctttgctttccttagcagcgcagaaatcctgtggggtaagtattaggattgttcccatttttcagagatggaactgagactcacagtagttaagcaacttgctcaaggcagagctggggtggggccagaggcagagatgaatggccatccatcaaggattcctgctcccttgcaaagactgaatctgtgtagggaagtggttgcctggccaaaacctgcatttctcaggttgcctgcattagaagaggccatgttgaccagttcttagcaatggatatggtgggaataaaaatgtcgcttcttttttttttttttttgagatggagtatcactcagtcgcccaggccggagtgcagtggtgcgatctcggctcactgcaagctctgcctcccaggttcatgccattctcctgcctcagcctcccgagtagctgggactacaggcgcctgccaccatgcccggctaaggtttttttttgtatttttagtagagacgggtttcatcgtgttagccaggatggtctcaatctcctgccctcatgatctgcccgtctcggcctcccagagtgctgggattacaggcgtgagccactgtgcctggccccaaaaatgtcacttcttagtggaagtggttatgaagctgatgtgccttctcctctctctatcgcctcctgccaatagacattaatcccttgactgacttcagaagccatgtgtggtgttgaaatcttacaaacttattctgaaatgcttccaaaaagcagaacaaagaaagataaaattgaaattaaaaaataaaaaagaagtcgtgtatggaggaggacagtgtccatcagcatggatccctgaatgaccacgtgaaacagagttcccacctctactccagcctccccacacactgctaattgcacgatgcataaaagagacatcaacttaaattggactaagtcgttgagatttcaggaggtatttgatatagcagccagccttatcctgactaatacagaagagtcttgtttccgaggtgcattctcttcactgctgcaccacaaagtggcctcgggattgtttagatttatggagatagtagaaaatgttctccttattccctagcccaagagcaaaagtgtgttggtatttttttccacctgtgaaggctggggagtatacgggagtgacgttcatgtgcttctgagccgcttccaaaattgaccactcccttcagtcttctcatctcagtaaatggcactagcatatactcaatggcttggcagtcattttggatttctgtctttcctttgcccccacatcctaactttcaacaagtcctgtagactctacctcaaaaataaattcagtgggtgctggaactggctcaagccaacttgtgagagccgactgtcaaattgttagaaatattggaagacagttgatgtcatattgaaagttttaggcggcccatggtggaggtatttgcactatggaaattgacaaatgctacaaaataaggtcaccctgctcccaacagagcagattgttaaatgcctaccgacacatccactgaatattttccaagtttcaccttttcttaccacttgcactgctaccacccaagtcatagccactagcatctcaccttatcttgcatatatgactgtagtaggctcctaactggtcttcctgtaattttctgctctttcccagttaactcctcacacagtagccaaagtgatcttttaaaagtgtaagtgaggccaggtgcagtggctcatgcctgtaatcccagcactttgggaggcctaggcaggtggattacttgagccaaggagttcaagtccaacctgggcaacatggtaaaaccctgtctctacaaaaaattagccaggtgtggtagcactcacctgtagttccagctacttggggcagggggaggggtgctgaggtggaggaatcacccgagcctggggatattgaggctacaatgagccatgatcatgccactgcactccagcttgggcaacagagcgagaccttgtctcaaaaaaataaataaaaatgtaagtgacaccacatcacttccctgcccaaacctctctgggccttcccattgcccttagagtaaaattaaaatttctttttgtagtttacagaactttacacatctggcatctgcccacctttctgactcagcctctgccactcctctctcactcatcggtctgcagctggggtggtggtgtatctgttccaccaacatagcttgttctggtgtcagggtctctgtgtttgctgatccctttgcctcaaatgctcttccccttgatcttcatataatttgctgttttacatcatataggtctctgctaaaatatcacctcctcctagaggccttccttgagctatctaaaatagtcacctcccgcccaccctgccacagcacgtgcttcctgaagttatgttatgcatgtgttcacttgtttacaagtgaaatctgctgcttctactgaaatgcactttgtgagggtgggaatctttctttgttcactgtattctcagtgcacgaactggtgtctggcaccagaagatgctcaatatgcctactgctaaatggacaaacacatacctgatcttcaatatgacatgattgaatgtagccaagtcaagtcagcagatgctcagatcataatgtgggtggaggttctggaaggcagggcctgcaagatagttggaaagttggatgggctgactatgtccaaggaccacagggcaaagggggaaaccaagggaagaatgaaaacagaacagaaagtttgatagggtacctggagggagagtgtacgccgagcctcaggtcagtatctgtcaatgaagcgtcagagtgtgtgtctaggaggggcaataggaacaggatctagatagatttagcctaaagcctctttgttagggcaccagagaaagctaatccctatctataactttttcactacgtgacttcgggcaagttacttaacctctctgattctcagttttctctgtagaaaagggttaatgatatcctcctatggctggtgggagcactaaaggaatagaagattaaaagtcttgagtaaaatgcttggcatgcagtaagtgttcaataaatgcttagtaactgcaaatttccatactctttttaaccttcctgcctgtaaatgatcactctttttattgtctatatcctttagttggaccttagagacaggagaagcagggtatggaagctaaacaggacttagaggtgaaaatggtgaatgattaggtctcatcgcatacccctgtaggcagagttgggatggctaatgagaagaggttaggaggtatcaaaggctccatacagacacggccagtgggaggaccttgggacagtcctcattccccatggcatccacaatgggatccccaatttgttctctgaagtggcatcttctacctggaggccttttttattgagacttacagcatggaggagaacaccaagaaggactgagagggatgcagtggggacttaccaaggtcacaaggccagtgcttggcaaagccgggatagaaacccagttcctctgactcagcccagcactgtctattccaccttctactctgtatcacctcatgtaggagctgcttttccaaaggggcatcagctgctccagagcatgatctgttatcccctctttgtatatccacattaacagttgttcaaccaatgcctgtggaatggaattaattcaagggcaggttttttctacaaggtagatccatgctctcttttgaagaggcatgcccatggcatgaggctgtgaggatgagatacttggaggctcaggtagatttagaaatagaacagtgaaatttgagtttagtaatgaatacttactaggaataggataacaatcttctaaatctataaagtgcattttagcccataaaacccattcagactctcattttcccccacttctcccagcaagcaagtctgtgggtggactcagaagaggttaatgtcccatttgcagttgaagagactgaggcacagacagggaacacaatcgcctctgatgagccacgtggccttaggctagagtctgagaaagggtgactattggctactgtagtacacactcctatcacctgcagatggagcctgcagtgcccccaaagaggttaatttctcactagcagattctttctcagacatccagcaggtgacttgcattttaatggaccccagatgcttattgcttgcaaagaggtcaagtttctaaatgggcagccagatggagagcccttctggactttccctggtgtcaatcaaggctgcgcctgccattggcgcctgcttttcttgccctacaatggtgctagcaccttccatgctaacagcttcctccttctgagcccctttcagggctcaaggctggattccaaggtggagggcaggaaagctggaagcataggcagggcagctccaaatgcaaagatctgaagacccaaatgcacattctttcctgtttgccagggaaacatgtagacaactttaacattcaatgccttgtagaagtgcaaccatcgtgcatcaccacatatacagtacagacaccaataattaaaacccagcccctgtgcctggggcctcatggctcgtgcagcacgttcacaattgctctctcatttgattctcataggaagctcagctcaatccttgactagctcgggtatttactggctgccaactgtgccaggtgctgaccttcgggagctcacagtccagatgggagacaggcacatagcagggaattacatgggagagtgcagggaacaacatgagacccatgcagtgtcatgggaatgagtgacaagggacttctgtcgaaaaggtgctatccaggctgaggagttagccaggtgaaggggcagggacagcggagtgttccgggccaagaaacagcatttgtaagagcctaggactgaaagaactcagcacttgtgttcatttccttgggctgccataacaaagtaccccaggttgggcaccttcaacaacagacagggattgtctcacagttcgggaggctggaatgccaatatcgaggtgtcggtagagttggtttttctgcagcctctgagggagcatctgttccaggcctctcttctagcttttggtagctccaggtgttccttgggttgtggatgtcattttctgtgtatcttcacatcctcttccctctgtacatgtctgtctctataaccatatttcccccttttctctaatgacacaaatcatattgaattaggattcactctaatgacctcattttaatttgaccatcagctaagatcctatttccaaataagctcacactcagcataggtagtaggagttaggacttcaatatattttggaggggggcacaattcaactcatcacagcacttcccaaagaatgggaggtggcataaagattgagggggaggacaacaaggggaggtcaggctagctggtctacctggaccctcttagggagggttcatcagccatgatgaagactttgcaatttattataagggcaaggagtgacccattttcgctgccctcacatagagttagttagtcactcctgtgagttcttggactcactcctgtgagtctctcaagagtactttcctaggtgggcgggtataggtttccctacttgatggtgcattcactgagcatagggaccaggtcttccaagtcttattattcactgggacctaccagcacagagatcagcacacaggacacgcttaataagtgtttatgaatctaacacatttaggtcagttattgcatcagctgaatgaagagctgtcccttcatttatatgtgcttttcacacatttcacatcgttgttgcaatagacacaatcccttttgcacatcttcatgtatattcttgatttctcaggttgaaatgttattttcatcttcttaaaaagagaatccttcattacattcgcccagactcctgtgtcttatgtggtttacaaaagagatctgactgggcatgttgtttttttttcttagggaaaaaaaatcaatgacttatttgtgtgtctttaatgtagagggaagtagtagaattggttttgccatcttaaggttgacaagtttaatacttaagacagggtttattcaatcccaacattgttagagcttgtaaaagtttaatgatctacttctaggatttaagatttgactgagtctctctctctctcttaaattttactccgacaggtttgctctgagaaaagcaggattttgtagccctggccccaatctttggacttctgcaaaacgggagatcagaaaccccacaatgtcccccccgaacagagtgattgagtggctgataaatctgtggacatgtgaaaatgaagtgcagcttgctatattatagcatccaaactgcaggggagccaacaaacatctaactctgcccactcattttaccactggggcgaacgaggttcagggaggagcagggactcacctgagcccaggaatagggaggctcaacggaaactcaggccattgttgcaaagcacatcctatctgcagtaaggtgaggactgtatcattagggcttccactttctcaggactttggagatttctggctccccagaagcctcatggaaaggagtgagccaccttcatgcatttacctactcccagagactctaatgcaagtgccccttcccaagcagccacttctcaagcacatcactactacaggtactccatctccaggtgtggatcccaggtgctctgcttccatgcatccttcacctggtttcccaggtcctttgcttggtctagtgcagggttaagacccactggacaagagtttgggagctctgcccttacaagctgtgatcttaggcaagcttctttatctctctaagtttgtttcctcatcaatttcatgggaataatgaaagtttctatctcataaggttctaacaaagacaacaagaccaatgaatgcaaaatgctgaatacactctctgttgtatacttaaatacttgactcctttggttgtgtgtgtagattccaattagtgggaagcaaaagtcacttcaaatcaatcttcattgttggacatttgggttggttccaagtctttgctattgtgaataatgccgcaataaacatacgtgtgcacgtgtctttatagcagcatgatttatagtcatttgggtatatacccagtaatgggatggctgggtcaaatggtatttctagttctagatccctgaggaatcgccacactgacttccacaatggttgaactagtttacagtcccaccaacagtgtaaaagtgttcctatttctccacatcctctccagcacctgttgtttcctgactttttaatgattgccattctaactggtgtgagatggtatctcatagtggttttgatttgcatttctctgatggctagtgatgatgagcattttttcatgtgttttttggctgcataaatgtcttcttttgagaagtgtctgttcatgtccttcacccactttttgatggggttgtttgtttttttcttgtaaatttgtttgagttcattgtagattctggatattagccctttgtcagatgagtaggttgcgaaaattttctcccattttgtaggttgcctgttcactctgatggtagtttcttttgctgtgcagaagctctttagtttaattagatcccatttgtcaattttgtcttttgttgccattgcttttggtgttttggacatgaagtccttgcccatgcctatgtcctgaatggtaatgcctaggttttcttctagggtttttatggttttaggtctaacgtttaaatctttaatccatcttgaattaagaaaatgtggcacatatacaccatggaatactatgcagccataaaaaatgatgagttcatgtcctttgtagggacatggatgaaattggaaaccatcattctcagtaaactatcgcaagaacaaaaaaccaaacaccgcatattctcacttataggtgggaattgaacaatgagatcacatggacacaggaaggggaatatcacactctggggactgtggtggggtggggggaggggggagggatagcattgggagatatacctaatgctagatgacgagttagtgggtgcagtgcaccagcatggcacatgtatacatatgtaactaacctgcacaatgtgcacacgtaccctaaaacttaaagtataataaaacaaaacaaaaacaaaaaaaacaaatcaatcttcagtttgtgtgccagggacagtgcccagactcccaagtgtctttggggcctctatgcaaaataactttcacccagtactctctccctttcatgtgagaggtagtgtcagaagtaacagtgaaagcttgaaagtacagactgtaaatggctcaagttgcatctccctggagcccctatttcaacatagttttgaccagaatgttggtttcagctgcaagcaattgattggcctatacaattctgtcatcccaacaactgattaattcatcagtaatgaaactgtctgtggtccctgctagcatgcgagctaccattatcgagcatttattctttgtcaagttccccaagtactttacgtacattacctcgcttagtactctcaataaagtcttattacacaagccttgttattctgctctaagcatgaggagcctgggaggtcagttcagagaggttaaggaagctgcccagggcacagagctagtaaacggaaaagctgggatttgaaccccagtctgtttcagtctttcagccacatttttaaataggcttacaggggaataatttatatacagtaaagtttacattttttgagaagagagtacagtacattttgagaaagtatacagttgcataagcaccatacagtaaagctagagaacctttccctaacccaggaattcccttttggccctttgcagtcaatctgttcctttcaaccccaacccctgggagcctgcagtcaatgatttgttttctgtgactatgcttttggccttttctagggtgatgtatgaatggaatcttgtagtttgtagtcttttgtatttgacttctttcccttatcagaatggttttgagattcatccatgtggtcgcctgtgtcaccagtctgttccttttcagtgctgagtagtagaccattgtgtgaataaggtataccccactttgttcgtccacgcaccagctgatggacatttggattgtttttagtttgtggctattatgaatgaagctgctatgaacatttgtgtacaagtctttgtgtaacaaatgttttcatttctcctgggtaaatacccacgagtggaaattcctgggtctcaggttaagtgtatgtttaactttgcaagaacctactgaaccattttctaaactttctgtacctttttaaattctcatcagcattgcactgaaggttttgttcagctacatttaaaaatgttagactcaacatctacctcattctgagccgggaggttgagaataatgaatgctacatttcgttgactctaagatgccatcaattttaagatgcgccattattttacatactgctaagaaagaaaagcatttcacaaatgatgacacaatgcttttatatcacttagaaaaaattttgcatacttattaaaatagcccatatatcacccttatacatacataaaatggaaaatacaaatgaaaaaaaatataggtcgggtattcctagaatgtgtattcacctttagaatcttctgattttttttttgactccagtcctcagtatttatatttttgtcccccggagtttccctgtgtgccatcagcctgttgatggtgcagcatttttaaaagagtgctctgttactgtctccaagaattattttcaagaaaatctcagtgctgggaactgtcttacttgactacactcatattttacacccctctacccacccagttgaattatgtatcaccagaagttaagtagcttctgttcaaatttagtaaaatgatttttggcaaattgatatttgttgccttaaagatagccctactccatagataaatcagtcccaccagcctctattgctttacaatttcattaatccttttttaaagaaatatgacaatttatcctgccttcagtagctgttggttctatatgttaagcaatgcacataacccagctgaagttttgacaacattcatggctgtgagacccagtccacacatgtatgggctgtgatgacttccttgtgacttgctgtctgacagtgattgaaagacgtcttcatttgtaggagacagtctgatcttagggacattaaaattgaaaaaaattgtgcatcttagagctcattaaatgcagcatattttacccgagacgcggatttctactgtgctctatttttcaatatcccccaaattcccataatagacaagagaaacatctgcttcatttttggccacttctttctccccagccacctctaatcacaatgattctcctcttcttaaccacttctgtcaccttcattcaatgcccattctctttaccatagctattgcaaaaacctcctcacttctctaattgccttctagaaatttcttctccttcaatcagtcctatttattattcccagagtaatcttgctcctataaaaatccaaacatgtaattcttcttcctaaaactctttcttggatacttattatttaaagaataaagtacaacctccttagcatgacattcaatttattttacgttctgggtcctacattttgccccagcattattctccaccatttcccactccaggcacacccaactatttggtgttctccaaacgtgccttggactttcccttgctgggacttttccattctggaattctgtttatgcttttgtctagaattccttctcttccttgttcctattgaaggctgttcatagaaatgaagcataatgctcattctggttgtattagcatgatgcatttatgggtgaagttttctcatatatatgtgcatatatatatgtaaatatatatacacatatgtatatgtaaatatatatacataagtatatgtaaatatatatacatatgtatatgtatatatatgtagacacacacatatgcacaaatagacacaatcacatatattcatcttattcattcttagttgctatgtcctctatggaattttctttgtgctctttaattggattccttccttcatgttttctcaacacctgcttgtaccttcgattgcagcatcttttgctgtaaaatggagataggagaaatgcataggcctatttcaacaattaattcaattacatagactaagggtgctagaattttggaggcacccgagtatgatgaaagacatctagaacttggcatcaggcaatagtgagacaaagctgcagccctgtcactttctacctatgcgaccttgggcacataatgtaacctccttgacttgtgtttcctgaagttcctgagccaatgtgagccctccagacaccttgtagaaccccttctccatagagaagaaatgctgggaaaactgccaagtgccttcctgagtcctcatgggtagggcaattctgtccctcaagttacctcctccagcccttggttcatgttttgtggaagagatggggcttgaaacatttctctctcctcttacagattatatacgtgtagctggcacaggaccttgctagcacaggacctcactcccagctcctcctgcagctcaacatggccaggtgactggttctcactaaagcaacgtgagtggaagtgacaggtgctaccttggggtcaaggcttttaatttgcaagtacctctccaggctctcctatttcatctgctggctgagtgcagatgacaactaggacctaggctagtgcttctcaaacttgagggtgcatcagaaccacctggaaggcttgttaaaaaaggttgccaggccctacctccaatatttctgatctggtgtcccagagaggggcctgagcatgtgcatttctaacaagttccagggtgacgctgctgctgttgatataggaactacagtttgagaagcactgtcctaggagacagcacagacacaacatggaaagggcctgggtacctaatgaccatggatggggcagcagagggggtgggtcggtcaattgggtatattcatctgccactattaaatgatcaagaaataaacttttagtgagtttgagaatttatagattttggtgagtctatatgcattacagtgggttaatctatccttcaaagcactatcccagctattcatgaggctagagtccagacccattgaattgtccatttgctggctgtctttcctcctggtctggacccagctttggagtccctcataccctcccaggtatctgatcacaacagtctctgggccatcactcagagactgacagtcctaatctcctacaagccctcctgctctctgccattggacctatggatagtcgccccatcctgcagaagcctagagtgacctccaacccactggacttggtaatgaggacttttggcctctccctggctgggacaactcatcccccccatcctaattaattgtccctggttgctgccttcgccagcttctgcccatgctacacctgcatctgagaacccccagtccccttgcagaatgctagaatgctaggagacagaatgctagaccagtctccccacctcatacccagttcctcagttccagcactgcccaggcacacagtaggtctcaatgcctaaaagcaaaactgcagtgaccaattctgaggaagaggtcaggacaagaggaatgacagatggcagctgatacagccagccatcacagccaggcacaagatacaggttcagtgtcactccagcaaagttcttggagcttatcagaatgcagtctctcagacgttaacagggaaattgtgtgataattatatattaaaaagtttagcaagtattaagagatcactagttcaataagcatatgaaagctcaaagcaggattcatgccattaactcaaattacatgagccgagtctgctgtcgtctcccttttaagcagcacatcaaggaaaagaggtgctttcattggattattaaaaggatttaattaacatggaatacttcacaggaagacaacctatgacagaataattaaaatatagtttgttgaaatgcacattaattggctactaattatcacatttcgttcccctttatgggctaaagatacgctcaggaggagacatggctctgtgcagaagtacatttccttgcttgttccgctcagtgtttaattagaagaaaggacaaagtgcttcactctgcaattctagaaaactagattggaagtcagagcgagcaaatgaggggtattattgcacactggccatgcattgtagtgggagagagcattggactgggagtctacaggcctgggtgttcctctcctgctctactctccattcaccatgggtaattaccatgcttaaaacagttcacggctgcccttaccattgcataaattccaaatccctactatctggtcagttatggtcagacactcaactgtttttccaagattccccaccttgcccattccactctagccatgctgaccttgctgtaccttaagcaagtcaaggtcattaccaccacaggacctttacacttgccattttctcagcctggagtctctccccctgaagcttcatatgggacttcttcccgtcattcacaacttagttcaaatgacttctcagagggcttccctgactatctaatctagtgttgccttctttattctctatcacatcacagtgctttattttacccccagatgtaacaccatgggattatcttgagtatttatttgttcacttgttttgtctgtttcttgtattgtctgtttcctccacttgaacatatatgctatgaaggctggaactgtatgtttccttgatgcattgcagctccagcacctagaacagtgcccgggacatggcaggcatgcaataaatatttgttgattaaatgaataaaaatggcagtggagcaagaagacctctgaaggtccttttagcgcgaacactttaggatactttgaacatgcagagaaccaaaagagacataaaggctgcagaagacagggtgcatcttaactcgttttaggaaccccctactggccctcagcaaagctttgctgatgatgatctttcagaaagcatttgtggcttggggtccgtgcaagtctgcaattctagggttctcaagaatcatcaggattcctgaccatctctccttttcaaagctataatcatggggtcatcactttaaaaactcacctcctctcttaattttttcttacctgctttaacctgcttcatgggattctagcaagaccaagaccttcctttcaaggctcattttgcaaattagcctagattgtggctgacagatgctgcctatggctgttgagtgggcatgcttgtttttcaaatgaagagttcagatccttggcattatgaaagtactttcctgggttctaaatctacagtcctgttctttcctcctttagggaaatctgtgaaacataatggatgatagaccaggttttaaatcttcttccccaaaagaggtggtcatcctcctccctaatgcttctgcctgcctcactccatggtgcctggtcacttcttcctcctccacctcagtgacttgggtgacaatgggctttatcacctccctgccctttgtgaactattgccttctcatggggcggctaaacctagggacgctgagacagccttgagccagaggcctggaccagcttcacctccagcattttgccagatgctttctttggctctgtgtttctggtttttcatctcagagcaactccttatccgagcacagtggaaattcaaatttcagagttgtaggtgagagctgagataaatcaggccctccatgaggtccagtccagctcagtggagttctgcacagtcatttggggccagaggtccagatagtaataaagcattgctttgtctactctgtgaatatattgtagaaatagtttatggaggagtgcaaataccggaacgatctcaagcagtgttgttctaaagtcaacttttaaggcaatatctcctttgcaagtttgcaatcacagtaactgctgcggtctgctatgtgagtgctggtgggctctgctgggcgacaatgactggcaggcgatatcatgggaagaaagggctcacatgtgtgatgttaacagggcgggacaaatcacagtaaacagctgcagtgatgtcacaggaccctcatggttaattcacatactgggatagctcttgtttacattctgggacagtagcaactgctttaaagctctattgtgtagtagttaaacagcagaggctgaagagccagacactctaggtttggtcctgtctatatcacctactggctactactgggctttggtttcctcatttagagaagggataattgcatcccttgtaatctaatggagagaatattagcaagaggtatgatgagcccagagtggagaaaacaataactgctgagtaaagagattatggtttctagagaaggtacatttgcagtggccctctgtgcatgactaggagttttataagcaaaagaagctatggcaaggacaggagtataagcatagggaaagtgatagtagtgatggtggagaggagactacattttaggtaggaaacagcttttgtgtgactgacctgtgaattgtagtggaacaagaacgtgaaaagatatgttgaagctctgggtgggcttaatgcaaagctaagaaatttggactttgttctgtgcaggatttcttttattttttctggatgatatttttatgcctagaaaataaataatatttatcttaagctcactgcagaaaacttgaataccaagaaagtgtaaagaaaaaacaatcatatgcaaacctactacacaaaataattgctgttaacatttggtcggatgtcttttcggtgctttttcgatgaatatgtatgctgatctagcattatgaaaatgttatctagggaatatttttgagcaggagagtgttgtgcaattaggtttgcattccggaaagattctggtggtggtggctgtggggaggagggctagatgaggttgcagccagaggtcaggacgctgttaggactcattctagtccaggggaggaatgatgagggcatgggccaaggcagcacctgtggggctgtggagaagtgacaccttcacaggaagagacaccaaagacaaaaaactgctaccttcgtcaagtcaaacttgaagtcaatggctgtaccaatgaccaatcaatggccactaagaatatcttctctaggattctggtctactcccaatcagatgcccatagcttggtcttccatcctagaaaatgctcttctccttgtgaataattagattatagacatccttcccctaggacccccagctctctccaaaaacttcactgtgcttccttcaaaactcagtaggagggatttttagactgttgttctgagatgccatagccatcaggatcccttcgatgtaaaagccagatattgtcctcacaagggaacttggcagcatggctcttctgactctgcaggtgcgatgccactcacctctctaacctcagccattgttctcctcccttccacatccctccccaaaccagctgccaccaagctgtgaccagaaaatgaaggttgtcacaaaggagcctgaggctgggtgtgagaaatgagatgtgttgtctgtgatgggggaagattgagaaactgaataattgggggcctgagaaccaggctcttcagacagtcgggatgggctcacagcatggaacacattaaaatctcattgcccaccgcttcccggtagcctctgctgcctcgcttcaagtgctgttttataagcagtgtttgcagagagttaacgaatttgaaggggccctgaaagggaaagggcctctgttgaataacttttctcttactagagaaaatgagagatggttttccttataacccaatttccaaagccttttattacagagcgtcaggaagatttgcctcctgccaggctgagtggggctgggccagctccctagagagcttagagatggttggatggctgctggaggcatggagggtggtcaaactgatagaatcaatacaatcttccctcagtaacacaaaagacctttgccaactcatgctttttgcactgatttttctctcctgaaaccatgaaatgggaggtagcatgtagcatgatggaaaagtaacaacagggacttggtgtccagcagacgtgggttccagttccagctcttgcactttctgacatgactgcagtttcctactttgcaaaaggaaagacaatatctgcctgaaaggctgccatgagtgagggtgagacaatatgtaaagtcctggtacatttagactctcaacatctcttcttgttcatcatagatactttgaatatttctcagccaaagatcaaccagtgggatttgtgcattttttgaggtaacaattttagggcagtgatttgtcaaaagttacgtactgagttccagacaaagctggaagccagatggtcagtggaacactcgcgtcaggtattctgttagtgcaatgggcatggctgttaatggtggaaatgtttccccagggaagtgctgctgggctctcttgcaccgccctggagctgggaggggaaatgcatttgcagtgggtctcttctccctcccaactgaaccctgggcccactggacaatgtctgtagaagaggggctctgagcagcagggacatttgagtcacttgttctttggggcttaggactggtcaagagaaagggactcctagagttctggcaatcctcccctaccctggagtggcagaggccctagtggaattggagtcctttaaggaaacaccaaatcaatgcagtggaggcactgcatataatctgaagggtaggggtcttctctggggccagtgaaggtgttgctaagagggtgggttgagatagcactaagctgacatgtgaacaggtggtaactgaatatgtggtttattttgggctttagaataatgagtcatattcataataaccaattgaatgtttcttgcctcagagcttccagagaccccaagacaacaggtgtcacaacttaaaggggtaagacttgcaaagagaggtagaataaacagctttatgtctcatcacctcttcagctctgataaaggagattgtttgggaggcagatcctttattattactattattattattattattattttgagatggaggtctctctatgttgcctgggctggccttgaactcctgggcttgagcaatcctcccacctcagcctccccaagtagctgagactgcaggcgtgagccactgtgcccagctgagaaagcttctttaataccagataacctttattgagttctttccatgtgccaggcatggtactatgtgctttccatctttaacccaattcattctcacaacattcaattatgtggtagtagatattattattattattatacctattttggtgatggagaagcttaggctaagacagataaaataacttattctaatgtctcacacatactaatgaggcttaaatgactgtatgaagcactttgtaaagcagaaggacccagcaaagaactttgattgttctgcatgaggcaggtagacgttgaatctgagtccttcgttttttcccctgcagttgagttctcttcctaggtgcaattcaagcatccagaaacagcagaaatgcttaggatcaataaattgggtggcagtgctgttaggcagtaaacttaggggagaattacacagggcagccatgaagacccaattctctaatgcctggggaaacactttgcaaattggtcggtgatgtttttaactgccttggatggtttcctatgagtgaaattgttctgtttggaaggtggctttagttggagacagtgttatttgattgtgttgaattcagtttgagtctacacaaatatgacacagagtctctgtcctgagtgggtttgaagtttaagtgggggaagggagagagatagtaatggagttagactattttagcatcactgcttatatgtgtgtgtgtgtgtgtgtgtgtgtttgcacgtgtgcacgtgtggtggatggggatcaattgaagggagtgaccatagaagggctattgtaaaataaatgaatctctactatgtcaataagataggcttaggggaaggggtatttcaagatgtgggaagagcacatgcaaggatccaaaagggcctggggttgccagttcaaagaccatcaacctatgtaccaagccctgctagtgtctgtggctaggatcattttcaagtggttcttctgtcttctgtgctttttgaggaagaagttgacaggcaagggaggtgggtctgaaaggaaggaatggccaacctggcttcaaaagaagcaccaccagagggtacatacagtcctcaccaccagggaggatctatgcctgaggctggccggggactgagctgggggaagtaaggctgagtgatatttcatatctttccttactgagaagtgactctcagtgagacttttaagactgaaacacatctgaaatgaactcccagccacactagaccataaataaaagggaaggagcctctcacatatcaaggtgaggctgagggttttaaataaatttttatcccagtactctcaatgactctgcaagatacccatcattatctccatttctaggtgatcagtaaaaagtggatttgaagatcaaatccagatctgtctggctccaatgtctatgtctcaaatgctcatcctctccatgtctcttccgggtttcacaatggtcagatgtctcagaaagttatgggcacgcgggtaacagaatggtccgtggctacctaacctactattccctgagttatgcctgtagtgccctcctagctaggtcccacttatgcttttggtccgctgctgattaaatgaatggatttagaaggtacttgttttccagtgtagacggagtagtccaaattcttgtgaaataaggacaatacatgtcctattaacagctgacaccaaaatatcttttaagaatgatactatttgtttggaatataacacattcttgggggtgcaaagtgagaccccccagcaacatgtgtatgaagataactgttctttgagaggcaaggtaaaaatttgcttgctactctagaaagacaggaaatgaaaagtggaaaaataagaggtgatgaggagagagagatggtgaaaagctgagaggtgcaggatgtgacagcccaaactttgagctcatgagttaacccaactcatgaaattcttggtccaaatgacactgtcataaacctatgaaaggatggagcttatgctcaggttaccatggagtagaaattggacctcaggtgtgaagatcaggaaccgagataaggaaatccaggaggatgtcagcagtcaggaattcaaagcaatcatggaaagaactctggactcccacaggccttgatttcggggtttgagccggtttaagtacattttcaagggatacagggactctagctgagttctaccaaattgaacttctagcactctccagagcaagatgagattcagctcagataaaagcattctgttttccaggaccttagaatccaggtatataacgaaggctaccaggaaggatctgttgatcatagcccaagatgcctcttggaaaagatacttatttgaatatcttaaagatgacagccgcccattcctgcaatgtgatcccacagcaatgtggacactggtttcccagcagcttcatcatgaggtagacaagtgtaatggctgagagtaaaggtcagagccagagattaagggtctgtgggtgcatcatggtgttaccaccctaaggctatcaacccaccttggacttctgccaaggggagaggagacatggggagaagagacaatcttaaagagcaagttacacaatgaactgagtaactggagttcctagaggggcctaaggcataaagcagagatgccttggagtttaagagccctgacaagatgtggcatagctgcctctccactcaccttggcttgagaatgacagcacgtgggaaaatctgagagctgggatgatgttacagttgatttctttcctgtctctatgaccttgtaatgccaaggagccactggatgacaattatttacttagagcttaaatacgtttaaattcagaaaattaagcacagctctcttctaggtgcttcagcaaaattttaaacttttgtgaagcataatgaaatagattctgctaatctaaaggtttgtggctgcatcagacacccaagtttggtaatgagtgaggcctctggagctagaaagtcacagtcatctttgagggaagaactttgtggaatttggaggtatatgtattagtgtttacaggtaagctagccagtgatgactatgatgatttttctttccatctgccctttagttacctacataaaaagaagccattgatcctctcagcatatttccatttcccatattcccctaagttattcccataagcatatcttagcaaattctgctagcagtagaacatgtcttggtctgtgagaggtgccttaagtgtaagcacaggtgagggaggaatggtggaagactttcttgcaattagctcttcctgttctatgcaagagcccttcttggacagctgcttttgcagcatctgtctctttgttatcatcatcacattagctagtatttgtggagcatcttaagtggagcaagcactatgctgaccactttccaagaatatttctaccttacttcctataatgtggtaaatattcccaccttattcagtataaggtggcctttttcctttttggtctccattttacaaatgttaagtaacttatctagtccctagcaagtaagtgaaaaaccaagtgtagtctcaggtctatattactctaaagtccctgcccttaatctcagaaattgtttcctagtcactatcctcagagaagaaaatcattgaaataattgtattcattcattcattcaacatcaactaaatacctactatgtgctaagtgcaatgttaacagtcaagactacaaagatgaacatggcatggtccctgactttaggaagctcatggtctaggcgtgtaagtagatgttataaaagagaataataggataattgcaagcatctcaacagagcattatgggaatactaaagaggaaccattctgcattggtggaaggaggagtgttagagttgagaaagaagatgagccttagaattcttgagattaaaaactaaaaatgaaactcagcttgtccaagacatatttctgcagggtttgccgtctgactatatgataacaccaatgatctcatttttcaagacaaaaagttaagcattttatttacacatcccactctattattctccatatccaactcatcactatattatactaaatatccctcctaaaaatcttttgaaaacatctacttatctccagaggcatagctaccatcctagcataatctatcatcattatctctcacttgaatcttggcagtaaccttccaactggtcttcccattttcactctttctttgagcttccttttctctgcaaagactaatctgttactcatttggaccatattttttctagtagaaaatttacatttataatatatattttaaagtctttactaaacccaacatttgggccttcttggtatctatttctattaaagatttttttcttgcgtatgtgtagggtccagccccacagggttggtgggtttctccccgtgtgtggagacgagagagtgtagaaataaagacacaagacaaagagataaaagaaaagacagctgggcccggggggccactaccagtccgaccctgtggggctggaccctacactatggatcagagttttctatttttattcatgtttagtaatttttgttgtatcctggacattatggatgatatggcataaatattctgggttatgttatcttcctctgaagagtgttcagttttgttccagcaaattgttcagtttctggctgatgaccttgaacttttagagatttggttttatgctttgttggtggaggaggaattctgtggtgttctctaatctcctctaacttcatagtactaaaatttcaaaaattcccagtgaatctggttgaggattgtttttagactttattagaatacatctagtgtagtccttactcaaggaccaagatcagcaaactttctcttgagggccagatagtaaacattttaggcttgtgaaccatatggcctctgtagcaaataatcagctctactactgtaacctgaatgtaaatgaatgggcaggatgtgttctaacaaaactttgcttataaacattggtagctgaaccaagagccataatttgttgaccctgcctgaggacatgatccttactgttgttgttttttttttagacggagtctggctcaatctcagcctaatgcaacctctgcctcccaaattcaagcaatactcctgcctcagccttccaagtagctggaactacaggttatgcaccaccacgcccgattaagttttggatttttagtagagatggggtttcaccatgttggtcaggctggtctcaaactcctgacctcaagtggtccacttgccatgggctcccaattacaggcatgagccaccatgcctggctgacatggtccttattcttaaggcatggctttctgatgtcttaactggatctccaggtgttaacaaggcctctacactctgactgagcaagaactccagtatcttctagcactacttgacttctagtatttttgctccactctcaacctcataacagcccttcctggtaagcttttatgccttctccctgtgtctgtgctgtccatgactcctaccacaaagatatctggggcccccttcctcacagctccccactttatcatggcctaccccacagattccagtcacttcagtagtctcaaaatctgattcctgcttctggtcagtgggaatgtcatgctctatatgggctctgcccctctacatcacagctagaatattgtccctaaatgaagaactgaaaaaaatgagatctcacttcataattttcttttttttcaaaggtcgtggtcttgccattgccattgccagaaagcagtttccttatatattctgcctagttttgtagtcacttatggcagagggctagcatagtgccagtgtctccattattgtcaaaagcagagatccccacattcatacctgctcttttcaatgtattttctactctgcagccagagtgatatttccatctgatcatatccagtgccctctttaagattattcaatgaccccttattgctttgaagatgacatgtaagggacagtatgggtttttgcccatcagtaaattcccaacacacagtgtagtacctgccttatgatagctatgtctatgatataactatttttgagtaagtgaatgaacaagaaataacatttttggctgacagaacaacataagcaaaggcagggtagcataaaatagtatggagaatagtgaactatttggtgaaattccaactcaggatgctgactacaaattactcaaaggcctcatgtgcagaaaatgtgacaattgaagcccatgttactgtactgccattttttttcaatcaccaaaggccttaaaccatttgctcagcatgaagctcttaagatgaatacagctgtcgaggcaaggcaaggaaagctttcttggacctcggttggctgtgttcacagacagacagatggacatgtgcgcaggcagaggcaatcatcaatttgctaaaaataacacctcaaccagtttttcacagaaaccctaaaggaagagaaaacagatcgatagcaagcataccacttgtgtgatgttgacgtcctccctgatcagagaaagtgaaatcaccttggagaccaagttctttcccagacagtagaggaaatgactaaggcaactgctactttggaaccaagggaggccccaaaggacttatgagttgattaaataaatctgacaggaaattttagataaggaaaattggcatttatgatactcagggaagggaaaagcaggatttgggcagcaatgtatctaggaccttttcgaaggaagatttttttaaatgttcagaggaaagcgaggtgtgggtctgtggtttgagactctggaaagaactcaaatgaggtcaaaagttctccaaaatatagtttcaaaactgtgccctagaaaatactcccaaggtgaaagaagcaacgaatgtgaccatggaggttagcaggagacagaaattcacatttattgggtatcctctgggtgagggcagactgcttggggctttccatgagttagctcatgttatctttataataactccatacgttaggatctattattcttatcttagaagtgaaaaactgaagcttagataagttacagtatctgactgaagtcacacaactaatacacagcagaacttcaattcatacccagatttatctaattccaaagcccatagaccttccaaaataccacatcgcctccctggtgtgcatcctgtttttttgtatgcagtagtaggtggcatacttctgggcagtctaaattttcagaggtcaagcctttctgtttcctgggccatagggtaatgaatgcagtgttacagagaaaagggagcatcgttatgacgaaaagggagattctcatttcagaaatgagaatgttaggcccactcattactggtaagaattctttccacttccccactcatgaaggccaacactagaatttatggatatatgtatgcatatatgtcatggccaaaggtcaaattccagctttatcctggagtccggaaggcacaggtataacatccatgcctgtgtgcttggcttgacatgcttgggttttaaaaatcaattaaagagaggctttgatctaacatagaactgatagcactggcaggtgctctctaagcttagtttcttgctatgcaatgcaacatttataaaattcattcccacctgtagcaaggcaaccccactttacatttgtgaagggtcttcaggaaggcaaataattagcttcggtgatagaaacagaagactgaacagaaacaaaacacagaaactcttgttagtggactcttcttccactgtctgcatcgtttggagtgctgcaatttgtagaacaccatccattttcttatacactttggtgtttttattcagacagacatagggggcgtgagctagaacatatgctggtgtgagtttggatgtgtgtattgaaagaagagcaggcaggagcctggaaaaaaatatgtgcaaatatggcaaggagcagaaagcccagcgggaattgctggtttcctagcaatcaatgaccaatttccctttggggctattcccagaagtgcagatcacttcaaaaatagatgcacgtcttagttcagtgattgacgtttttctaccaaggactgtgtgcacaagcatccctctagtgagatcttaagatcttggatttgagtattcacattcctaagactcctcttcgaagttccctcctcacttcccagacttctcgggttttatctcaggatagctgttccaatccggagtgatgaaaggatttcttgcagggaatcagtcagtggcagttgttgttctcaggacattcagaaccatcctccaagactcagctcaaaggccgcttcctttgtgaaaccctcttcaacttgtacgggccaaatgcccctttcacctttctctgcactttcaaatttgacattttcttgtaacacattttttttttttctaaatggctgtttttatgcaggggctatctttcccaatacagtagaagcttcttggttccatctgatttatctctgtcgctttctggtgccaagcacagacctagtgtacgctaggtgcttagaaatgcttgttaaatgattgaacaaatatacagagcctcagagatttcttatgtgctttcaaattgccattcccattcctaatcatcagccttgtattcccagcttggaaaaaagcagaagaatcactgtctaggaccgatggatgtcattgctgcatcagtgtaggacgtgacatgctacctgtcctggagggccaccaccaggagagagcacgtcacactcttgtgcatcggagtgagtcttgcctgataagggaagtcactcttggcacctatctcttgggaaaaaggagcgtctcagaccagagctggcatgtgataggcttgggggcttcctacaggaatgggactctaaggcttagcctccagagggttgatatgtgaggcagctcctggataagatggcaccaactacttggaatggacccagcagctagctaggaggtaggggtatcaagcaaggggctggatgggtggctgcctctgatgacatgtggatcccacactcagaccacaggataaactgggcctgagtgtcaccctcttgattcattttctgcactcccttagtatttaggcaacttccctgcataccacagccagttgcagctgctccacaggagaaccacaggattcatgggcttaggctagtgggctctaggaggagctgttgcagggagattgctcaagggaatgggaactcttgggccaaaggaaccatgatggcacagccagccacccgtcaaactggggaagcttccctctaaagcttaaatctccagagttttgctacttaaaatgatgaggctttctgctcagaccttctgataagtgggaagacagtgatacttcagttagcacaggacaagaagggaaatgacatttgcacagtatttgtcctgtaccagacactttacatgtctgctaatccaatctgctcagcagcctaatgatgtagatattatttttcctgtgttatggtggatgaaactgaagcctagaaagaagtgactgctcacaggataaaccgggaattaaatccacgcttcctcattcccaaccctggctccttctgattcttgcatttgaggcatctgtaaaaatgtatagctctacctcctcctgctccccatccccagcccaccactggagcatttttcactaaatgctgaaggtactcttggcctttacctacttcttatttttctaagctgcatggcctcaggtctgctccttggtgattccacctgaaacttctggagtgcatcaggctgaatgagaaaaagcattcagccagatccaatcttgtagccactgctcccagttaaagaaccagtgaggggccagactggaaatgatctcagagaccatctagtagaaccccatagcttttaatatggcgaatccaaggccacatggggagtgacttgcccaagcccatctgtagcaaaggagatgggtgggatgctagagccaggtttctcctggccacctgccttatttcttggatgctttgaccagcaggatgggcttcctttcactattgccatctggagagccaagtctgcatttgactacagacatgcatctctaactctggtactcgaatatttcttacgagattagatggctaaagtagaaatcagggccatagtcctgacactggaaccaggagctccctgcaggaagtcacatattcctgtggtgggaggagcaccgcggcagcccccctgaggaggtgaggctgagctgatgccctgcacggtcttgcatggctgagatgaaccggataaaggtgcattgctctgagacacacagacacactgccttgtctctgtctgtcttcctctctcgttttaaagcctgcatccctatctccaagtcagcaatccaattagtggagatttttaaagaaaacctcaatattgaaaaacagaagtctcagttaaggaggcctgccctgactcgttaatccaccggtcagtttgcaatggatcaggttgaagttggctttccccaccacctccaggagtgctgatttaaggggatcaagcccttaatcccagagattaggatctttgccagcagcaccagtacagtccctgggtcagtggaaagtcacataaagtacaaaactctgtttgggtttcctgagttaattatcctttttatttgttgtctttctgcaaataggaatatccaaaggttgcagaggctatccatgcccctgaggagcagcataatggcactgcctgccatgcacacctcgaagtgccagcaagccacccctagcctgttgggagcaagccccccaaaatctggccataaactggccctaaaaccggccataaacagaatctctgcagcactgtaacatgttcataatggccctaacgcccacgctggaaggttgtgggtttatgggaatgggggcaaggaacacctggcctgcccaggatggaaaactgcttaaatgcatcttaagccacaaacaatagcatgggtgatctgtgccttaaggacatgctcctgctgcagttaactagcccaacctattcctttaattcgcccatcccttcgtttcccataagtgatacttttatttaatttaacatctatagaaacaatgctaatgactggtttgctgttaataaatacgtgggtaaatctctgttcggggatctcagctctgaaggctgtgagacccctgatttcccacttcacacctctgtatttcttaattcctctagcactgctgggttagggtctccccgactgagttggtctcggcactagtctgtgtccctggcttgcccttccctccaactctgtcctgcaggatctctctctctcattaataataactagcttttccatatgagccatccaactctgtcggctgggaacttctaccctcattgccttctttgggttttcagacagttataggagtcagagcagatattcaaattctcattttacaggtgagcaagttgaggttctgggaggacataatagttagtaggtggcagggctgggacttgaaagcagaacttctgcctccatatctgtgcacacagcaccacctctgcagtccctgtaccatgattttctttgtgccttgctctctgttgttttccagaacagtccttagaggtaaagtggacacttcatctgccttaccagtgcccatgcacgtcctcatcttccttaccaagagaacccagaactggttcagagatccaggcctcccacctcaggtgactccaccctcagactgatctgaggataatcccattccccctaacaatgggaagggccatgtgaaccaattctggccaatgagagagggaaaagagtctgttaggaaacttagggaaaacctctcctctcttctaagagactcataagaagagagcttctcttcctcctctggacgctgtcctgtgtgtagcactcaggactgctgaagacatctaggtaacagcttgaaggtgaaaccagcactgaggtttcctgattcctgggtggagcgcagactggagcctaagccctgacagcatggtgagtgttgactgtcacacctggggctgattctgaacttcccatgatgtgaactcaggagttttcttactgcatatgcctgttagaatgtggcttctcctcttgtagctgggagcacccttcctggctgggatcagcctgcaggtgcgctaagccctcctcactcagctctcccttcccttacgtctttctctgttactctgcctctgtccttttgtcaggagggcttatacatgaaggggaacttgaagtacagaatagatgggagttctgcctagctcaggacaaatacttggaatacttgagataattgcattttgtttgtttggttggttttagtgttaagattctttgtggtggccatattacagccttgggaatggtagatccttttatttttcctataaaggagccaccccttccacagtccctgctgggcccttccctctaaccaaggctcagctgattgaaccaggcaggaacacccagctccagagagaatcatctgggctgccagctgtccatacattgtggctgctgttaatagaaaagatgagtaggcaactacaagtttgtcatctgaggactttgaactaagggcacaaaacatgttattagccagtggagagacagacatacacagacctgggagagcatgggcagctggatgtgctatagtatattcccccttacagcagaacagtcatagaaggtttgcaatgctcctgagccacctggaaccccaaagctctttcaggtccgggcacagtaatctctatctccaggattccctttgccacccactccttgtgataatctcccatgatttaagatgtcttccccctgcagctagacacccattccctggcatgacacacagggccctccgtgatctttcctgactgtgtcccctgctgtctcaacttgctcctcttaactgcattgcctccactcctctacacatgccacatccttccatatcttcctgccttggtttgtgctattccctctgcttggaatgcccttgctctttttcccctggtgagatcatgttcatcttccagaacccagctcctgtagctccatgattctttcaagtagatatgagtattcctttccttgttttctcttgcatgtgttcattcaaaatttatgtatttagtgcctaccatatgtgctgttatgactatgaaacaaggctggaggaggaaagagtggcaggattggggtggctgtggtggctgctttagtgagggccattggggaagtctctgagctgagatctgaaagcggtgagagagtggccttatgaaggtctgagagaagaccttcatttctagcagagggaacagaaaggtgaaagccccagggtgagaacaattctggaaaggaagacagcaagcgtagctggagtgtagagagtgaaggtgcgtcagaaaatgggcagggattaaattatacagagcttgatagcctcactgggccactgcaaagaatgtgaatttggtctaagcatgaagggaaattccagggaagggtatgagaggagcaagtgccaggaactgatttgcattttagaaaggttcatttggctgctggacagtgggaagggaagagtaaaaacagtattccaggcaggatggtgtctctggagggagaagcgtggcaggcctggggcctcctgtggagggagagtcaataggacttgtggacaggctggtcgtggaaagggagggcaagggatagactggaattgaatctcagattaaggcctgagcaattgggtacatggaggcaccttttactgagatgggaacaagtgggggagtgagtttggaggtagaggtcaagagctgggttaggacctagaacttgtcaaccatactgcaagactttgctacaagtcccagactccttgaggggagattccatgcattttttttttggtctctctcccccactctacatagcgcaagtcttcagaaaagaagatacttagtccattgttgatgaaggctttgacttccacaatgtccttattactgaaaaattgcaaatggtacatggatatccttcttttcattaccttacttggtcaccaccaagccattttgtttttatatttgattactcttcaaatggcagtaacatcatccctcagtcacaagtcaatctgacctccctccacacctatgccctcctttggtcctctcacagtcaaacatgacccaaatgggtgccaggggagccctccagttagagacttgtgctggcaggtgttccattagcataccttggttcaggaagatgtgatagcttgttcccactgggttatgtcaaattgaccaatcaatcaccaaccatatactgagcacctttgataataagcccttacctttggcttgcactttatagcttacaaaaagcatttttatatatccgctcattggacttgtgcaaccaacctctgaattgatgaggcaaggtctctggatattaaattccctatttcatttcaacttccacatcttgcaactaagggtcttaaataagactgttccctctgcctggtgtgttcttgtccctctcattggcctggtaaacttccggaaatggtaccttccagaatcatcttaagtatgaaatgacaccattcacgaccctcgagcagagttaatcattcatcccttccccctctgtgttatatgaggctatagggatatatctgcctttttattaccctctagatatacataaactatataatacatatatacatacctatctctctaatagataatattctttttgaggggaaggaatgtatttcacctcagaatctcaatgcctgatatattcctttacatatagttagcaatcaataaatcaatggccatatgggtgttcttacagcttaaggtcatattgtggagaactgtgtatattttgctaagggatatggaactcagcctgtaggcataaaatagtcaatgggagcttgatttatatcacgaaaggcagatggcaggctcatttcatagaatttatttccctgaaaattgatgagttttgatttatgtcttcccttgaaggtcaggttatggactgttcaactcactttgcctttctctctaccaagggtttcatgagaataagatggtggagatggtgtcagttatacatagcctgtttgtttgtctcacccaggaagtttcatttcaacacatcaaattttcattgagcatctactgtgtgcctggcactgtggtcaatgccgtgataataaggcaaggtggttggggcgccctttgcaaaagccctggaggtggggcctgcaaggcatgtagaatggtgacatgtctgagtcccctgtcgtgtagccttcattccatgctgttgtgatctgttcccagggacttgcagctcaagtatatctgtgcttcactggaagagttgaaagagctggagactgtctgtgatcaatgagcccctgtcactctcatgacactttcctgaaccatttcaccagcactcaggtgagcctgcaataatgggctgatgggatgggcccacagggagtgaggcagtggagggcagcagcactgatggatgttaagcatcagaacggcccactagaagacttaattgacttcttcaggctcttccttcgtgtgcacttattcatccatccatccatccatccatccatgcacacacccagctatttattctttcatccactcattcatatctttagcttaaagcacaggtctgcctcttctttttggtgcatatcatccatccatctatccatccgtccatccatccatccatacatgtatccataattcatccatgaacccttaattcatttttaaagcacatagttccttgctcaaaaaccctgactggctgtcatgtgtcgcatgttagaagcaaagttgcctgtcttagcattcccaattagcctatatttcctgatcatatctatatgaacccttccttagctcactttcccctggggcaagctggatttttttctcctctccttttctcccgccctctttctcctttcctctgtgccctccccatcactcctctccacctcttgtttgttgcagtccaactcttcattcacttaagtcttcacttcctcgtgtgactgtcccctttgctcttgcactagctgtctcctgggtgatctaccccttctctgaactactaaagctgtcagcatctgactcaccctttgggtttttgacttttgtgtccttaaatttatctttttataaatgtggtctttctcctccaagaatcctgcctttcttcagtcctagtaaagactattgcctttgactctatcccatctagccttgagcccatcaggactctgagaaatcaggaatgagtcttgatacttcaagctttgtgcttctggctcctggcctgagtcctgggcacctgtgaggctctgctctgaagcctttattctcagaccgctgtacttaaaggaagggtgcatgttaggctcacctagaagcctgtttggctttaacacttgtgtcattctcctgagccccagcactgggatgcaacctgtccccttaccccaaatttgatgagcattttctgtgaattgattagtcccagagaaccatatcactgctgtgtgtgtgtctttgagtgttaccattttagttacttcttgctgtgtaaccatttcaaaacctactgtttctcatgattctgagttggttgggtggttcttctgctggtcttccctaagttcatttaggtgactaccatcaatttaggagctccctggatagccttgcccacgtgtctggggtgaagtgactggaatggctgggatgaccaggcctctctctctctccatgtggcatctcatcctcaaggaggcaaggctaggcttctcagaatgtggcaggctgggagttccaggagtataaacgcagatgcttcacagaggcctcagctctggaactcacccaacatctctttcaccacattgttggtcaaagcaagtcacaaggccagcccaggttcaagagttggagaaagagatttcactcttttgatgggaggagatctaaaatatcgggcccagctttttcaattccccacctcatctaccctgttccattcaccagactaatctcccccagaagcgtacaccattccagattagtcccaagttctccactttagagatgacatataacaccctgggctatgacctcaggagccctctttttacctcactagatcatctcgactctcctatacactctgtgaggcaggggctatgtctagactctggcaactgtctgcacatcatcctgtcgcatatttttcagagcagttattactacctaaacttaacttcttgttgttttgttcacttgtgcattgcctgttttccaccaaaacaacagtttcctagaggaactttgttttgttcactgattaatcacagtacccagaggtatacttagcgcagagtaggtactcagtagaaattttctgaatgagtgaaatgtccccaaagactgtgatccagcctcaaacccattgataacccctctcccagctcctgtcactggcagatgcccagaaacatgttatttaggacaatttattcatttatcacacataaatgtgtgaaatgctatgaaggttgtggacagcctctttgctcccatttgataaatgtttacaagagtcttctatatgccctgagagtgctctgctccttggaagtgtataatttgtttgataagacaaaacttgaacatctggaaagacaagaggatgttgtctgtttcattcaaattccttcaaagcagttcatctcggccatttgcatgtgtgctgggtgcacattttttaaaaagagcaaaaaccctgccaccactattagcactcatcaaagggtttaccagcaatccctcaagacttctcaggctcttgtttagatggggttgttcactgaggtgaaattccaggtgagaggagatattatatttctggcattttctctggcagaagatgaagactgtgctctacctgttccttctctgaagctagaagatctggtgtttcgactttgccccagccaactgaccacattgagtgatgtgcttagtttacactgaataccaagagatgggtgggattgctgtgcatatatattagcaggattttggctggaggccacttgtgacctctattgaatgtaacttcctcactcaggagttgatatggaaccactcactcctattggctcagtgcccagaaggcctcagagagagcccacaagatcaacccgacagaccccggctttccaaataaagaaacgcaccccccccaccccagggtaggggtctttgtgggtcctgcctacaccctcctaggattgctttcaggggctcagaaaattagcagtgatgtccatggccactacctgagcagcgtatgcttccatgtgaggccgggttatggcagagctgtgatttgtccttggaatctaggccacatccccaacacccataggcttccccaagcatggcaaggaaagggggactcagggaacccactgcccttaccacaccccaacccttggtcataaataggggagttctgaaactgaaggtggtgagctcccgcctccagactgaagtgatgatagaactcagtgcctctttatcttcagatcaaatcttatgacaccaggcccagccgcttacctgaatcaaggctgagtcagtgtgagtaaataggaccaatggtcactcccaagtagaacactaagccacccttaggagatctgcacgaagtgatgggcgctgtccattgtacctgctttgtgccttcccctgctccatagcctggcctggctggaagcacacagctgtcatctctgggaacattccattctctgccctcctcctgccttcaaccatgcacactgcctgtgacctcatctcctctgtcctcagggactgtcacaaccatctgcctatcatattttggagttgactatgaaatgaacaaggatcctgaatcttagttcttccagaaagatagatttcctcttatggtgtgaaactatggtcttcccaaaacgcacaggtgccaatcttcagaggggccacaatgtcatcatgaaggtgaaatatgggcttcatggtacacgtttacctggataagcatggttcatataaggaatccagaataagatggactgaagattccctcaggactcctttctcagatttcctgctccaacctgtgttaaagggggccactagaccatttagaataccctgctattttctttgtcatttaactttatttataagtatataaaatatagaaaataatacagagaaaaattaaacaaatacccacggcccatctcaggaaatgaaacattataaatacaacagaaggcctctgtgtgactctcctagatccaactccccatctaccttccctcctcagagataaccaccacctgcaacgaatattcccaagctagatattatgcttccagcacatgtgggaaagcaaacatcagcttggttaacagttttgtttgcctgctttaaatcttgtttttttgttttgttttgttttttcaagacagagtcttgctctgtcacccagcctggagagcagtgtcatgatcttggctcactgcaacttctggctcccaggttcaagcgattctcctgcctcagcctcctgagtagctgggactacaggtgcataccaccacgccccgctaatttttgtatttttaacaga[132 bp omitted]atctaagcaaaagtactatcttcagaatccactgtaactttttctgccctcaacatcaagtttctggtattcagccacgttgatacaggctgcttactcatttgaccatctccttctcttttggtggactgttagggtgtttctaatctctcactaccagagtgccgctcacttctcctgcacagggaggaggagctctctaaggtggttctgttcgtttaggtgtatctttgacttaactaaataataccgaactgctcttcaaagtgtttgtatctgcattagcataagagttaccattgctctaccatcaattagtacttggcactctcagattttttcattcctgttccttggatggtgggaaaatggcctttgctcttgctttaatttgcattcccctgatgatccaccaggcagggtgtatttcatgcctattgaccatttctgcttccacttctttatcttacctgtccatagccttgtccattttactattgagttgttgatctttttcttattgatttatagcagggtttcttagcagtagcactatcaacattttagactggataatcccttgttttggcaggggttgcgtaggggtgctgtgctgtgattgaaggatcttactagcatccctggcctctactcactacatgacagtagcaaattctctcccacaacagttgtgacaaaaaataaaaatgtttccaggcattgccaaatgtcccctggggagtaaaactgccctcagttgagagctgttgatttataggaacactttatttttcatagatgttaatctatttttagccttacaaattgcatatatctttacaaaaatattctaggacagtcaatagatgtggttcctctctgtctcaaaaactttgccatggagagaggaagatagaacggcacatttattgtgtctgaagagctagtttgggtggtctctgtttctattttttttttttttgctgcagatctacaagatatgtgttaatattcatattttatagatgaggaaaatgaatctggtaatttgcccaaggacactcaaccaataagagtagaaactggtacagattcaggtctgtctgtttcagcagagtggaaagaaggtggcaccaggagtggggaggtctgatcttagtcctggctctatcactagctggccatatgaccaacgcctggcctccacacgtcagtctcctcacatgatgataaaggggctggacacaagatctcaaatgttccagcccattctaccaacagcagagtggttggctttgccactacctcatgagtgattcatctctgaatctccactccttgttttcctcatatgaaggtagagatgcaaacagcactgagtccccagggcttctgtaagcattcgacgattcatgtaaagtacttaacacatagcacaagttccatagatgccatagactgtcattataattccataaataggagaccagttagtctggattgggaagcactgtgaaatgtagagtgtgatataaaggaatatttcactacctttaggtataaataataacacccaggaagagttttgtcaataggtaactctccttctttgaaaggtgaagaaaggagctctgtgacaagcttgtggcttatatggtggtggtgctttgaagagttactcaggcctacctatggtttgtcctcttttccaagagaattggcagctgggcagtgctatctgcaaaaactgtacggagataaatgttaacccaggggctcccagaaatcacaggatatgaatggggctctaaatgcatgccttgctttcctctccatgaaaactgtatttgaaacaagtgagtcaagctgctctggactcggtaggtttcatgggcagaggggcaggctatcagcaagcagggccccccttcaaaagagggagtacagagaggcaaggggctctttaaacatgcatgccaagagagcaaacgccccacagctaatggctctgcaggcttagaaaggggatgcctgcagagtttgcctgtaattagttgttaacacatgaaaataaaagccgatttggaaacagagtccatcatttatttatagcgatccaatgcaagtattgttttaaataaaaaactggacacagttcctagtcagaaccaaaccattcaagtagctccagatttacctcctcactcactcaccttctctctaccttttcttagaagtccgcctagaccagactgacctgcctgagccctgcaccctttggctttcaggcttgcattctgccccagactgttgtgcatgactagatcgtgcccctgattccttgcacttgtgcctctgtgtgtgtgctggtgaatgaaaagagcacagacttcagagagaacccagttcaaatcctgtttctagccattttcagctctatgacctcatgcaaggccctctccaagcctaggcttgttgtaattcaggtatagatgtgactaggtatggggagcccctagtatgttgcctagcacatagcaggcaccctcattccctcctggccaaggtctgcatctttctttttcattcattcttaatttatggcagaaaaatcagaacagcatagatagtacaagttctagagccagattgcctctctgtgttacttcaagtgacttacttaggcttacagcgcccaatgtcctccaatggaaagtgggaatgataccagtacctacctcacagggcacctgtgaaggccaagtgagcacttaataagaactcattgcaatccagtgctcttggtacaggcagtgatagcatgcaagaaggagatgttttctccttactccctacccataaatgctatacctggagtatggtgagaaagcaaagggcacctggttctttgagtctcacagacctgaaccaggatcataccgattccaccattgtgatcctggggaaaggtatagaacatctctgggcttcacttttcttctctataaaatgggagtatcaacagcacctacctcatagagttgttgtaagggttatatgcattaatatgtgtaatgcgctcaaaatagggcctgacatatagtatgttctcattaaacattaccttgtaacaaatgtatgacctctttgttgactttgagcctcttcattcatcttttctcctctgcttttccttcttataccttcctctggccagaatacccaactgctagggcttgagaagacaatgttgaagacagttagccctctctccattgccactgagtgctgtgtgatttatacacagtatcccagggaagcctcctattactgctgcaagggagggtcattttaagaggagtccaaggcttctggaacatgttatgctccctctgtggccccaggtctaagtgcagcccttaaattactgtgcagcttcagaagagactgaagcatttccttgtcagaaaacagctttgctccttctggaagggaatctccaggggagaggtgtaaaggaagaggagcggcgagcagggcagcctgacatgggattcaggtgctgctgagaggcctccccatgctgtggagacaacagaccctaccgtattggttctctagacccagtgcttcccaacctggcacagcattagtatttcctggacttctccccagaataaccaaacctgatatttcaggaatatggccctggaatgagcattcttaccaaccacaggggatttgggtgcagcaaatgaacaacagtggaaaagcagttcccctagcacctatttttaccagtcccctcattctctaaggaattagccaccaactgagagatgtcccagatatgactgctcagcctcattcccctcctctgtgttcacaccatgttccacccggcctgcccccaacctgtcttacaccaccatccgtgaaactcctacccttctgcctagggcctctccaaaggagagaagagaacctttccagtggcagccagtggtgtgttcctggtgcttgaggtgtgagttgaaaatgccattattagcatttttcatccagctgcatccaagcctggccacgcttctgttgcttacttgggcttccaatctccatttacaggttttgcacacagcgaggactcaaggactgtactttctgggtggagctgaatttctataggaacatacttcccgtctcctaaacagctgacttataagacacctttggaacccattctactggcagtttagagaccacctgcccttattttatttaactgaaccccttccactctactttgggccataatctctgattttaggaatgatgagacgttctgaatgcccttagaagtgttcccctatctactggtcattaaaagcaaatgacagcacagtgaaacactgtggtttagaagtttctaatcctggtagtaactcaagctgacatttcaattctctgagccttaatttttatttataggacacgttaaaccagatgatttctaaaatctcttcaggctctgctaccttactcatttacagtatcagtcatttacaccttagtatgaataaagactgaacaaagtaaaatgggtgggcgagacaattgggacggatagaagaataaagggacatagacaaaatggctaagggacaccaagaaaaaagttcaaacaagtttccttagggaagcctttgcctattcttgggaagatctttatacgtttggggttcagtcactatgtcattagactccatctctccccttatttacttcactcccccctcctcttccctacaccaactctacaactgacccggcttgaccttgacagagggggcactaatggcttttcaatacagccccacctggaaggtgctgatttcgcataatcctaagattagtctagtcacagttcatatagttcagggactgtaattaaactgtggagctaaacattggggtctgtgacctgaaacagtgaccgtggtaaaaccctgccacagcaggcaagaaaagatggatggggtcagaattctctagcttctgctgctgcatcctcacctggtcctagggagcaccttggaagcggttatagaatgcaggttaatggtcaggtgcgctgtctcactcctgtaatcccagcactttgggaggtcgaagcgggtggatcacttgaggtcagggattcagaccagtctggccaacatggtgaaaccccgtctctactaaaaatataaaacagtagccaggcatgatggtgggcgcctgtaatcccagctacttgagaggctgaggcaggagaatcgcttgaacccgggaggcagaggttgcagtgagccaaaatcacaccattgcactccagcctgggtagcacgaatgaaactgtgtctcaaaaaaaaaaaaaaaaaatgcaggtgggtgactcagatgttggctcagggcacactggaacacgatgtggcttggtatgtttacaaacctctaacactccgcctcattattctggaggggaaggtagaaaacaaggagatatagactagggctgcggggtacccatccagtttattcattcaacattcattgagaatcacgtgccttactgtgcccagaattgtctcctcctggtgggttctcggtctccctgccttcaagaatgaaagggcagaccctactggtgagtgttacagctcttaaagatggtgtgtcgggagtttgttccttcaggtgttcagctgcgtctgaagtttcttccttctggtgggctcctggtctggcagacttctagagtgaagctacagaccttcgcagccagcgttacaactgttaaaagtagtgcggacccaaacactaaacagcagcaaaactcattcagaagagcaaaagaacaaactaccacaccgtgaaaaacaccccttggatttcggcgtctggctcgggtgggctgcatttattcccttatttggccccacccacatcctgcttattggtccattttacagagagctgattggtccattttacagagagctgattggtccatttttcagaatgctgattggtccgtttttacagagtgctgattggtatgtttacaaacctctagctagacacagagtgctgattggtgcatttccaatcctttagctagacagaaaagttccccaagtccccacctgacccagaaggccagctggcttcacgtcttattaacatcctgaactccagggttggtacccacagggtagtaagttgaccaccagaccactttatacagcatccaaactggcatggagaactcagactccattcagatggatatcaattccatctggatctaattaaatgcaaaggacccagcatcacaaatacaggtggcaggtaagactcaaagtcaggagtgcagcactgctgcaactctgggtatagagttctatgagagcagggctttgaccattgtggtgggagagatgtatgcaaagagggagcggaaggaaagagctggggactagagatctgagtagaaaccgcactacaggtggcatcagtatcatgaaagaatgcaaatgatgttacttgtagatgtgtgggtccccagggcccacactaggcaaattggatgatgggtctgttgcactaaaaccaatgccaggctgcactcatgagtgacgctgagggtcctaatggctccctgcacctatcaggttagctcaggattaggaggagttaagaatgagagtgaagactcaatgaccccagctcagcacctcctcctcactcttgtttttgtgaccctggggtccccaggtacttcgtcagtgggatctcactcttgctgcgtctcagctaatataagataaggtggtagtaatgtcttattgtagcacctccccaagatatgaaaaataactaagttctttttattaaatggcttaaaggcctatgggatacaagcactacaagtgtaatagtgtcatctgcataggggcacctacccagggttaatgggccacggtcatgtagataccacctttttggtttatgcggtaggcaaaatttttaaaatgtccccatcctcaagatcacacctctaatctctaggatctttgaataggctgagataccacgtccatgaatatgttacatttacagcaaaagaagttttgcagatgtaattaaggttactaattagttgaccttaaaataggaagattagcctggattatctgggtgggctcaatgtaatcccatgtgttcttaaaggcagaagaggaggacagcaggtgaagtcagagagattcaaagcacaaggattcaactttctgttgctggccttgaagatgcaggaggccatgagccaaggaatgcaagcagcctctggaagttgaaaacgacctaagtgctcagtcctacagctgcatggaactgaaatctgccaacaccctgagtgatccggaagtggattttctcccaaagcctcctgataggagccccagccagctgacagattgacttcagcactatgacatcaaagagcccacccaaggctgttactggaaggagggccttgagtgtaagttattcagtttcttggcgttttgaacaaagacttggacaaaacacacaaagtaacaaaggactgaaacataggaacgaagtagggaaagcaggaatgtattaaagtgaaaaaggaccccacagggtgggagtcggcccaagcaggtggctcaagggcccagttgcaaagttttctgggttttaagttctcctgttcagattcctattggctaccctttatctggatgaagaatttggcctgtggctaattaaaggatgaagtgaattggtgtcctatgcgatgaagggatggtccctgcttggtcctcggcccatcgaaggcactctccctgtccatctgagacattgagtagcctttgctcctttgctactctggagcggggaggtggggtttttccttttggtttagctttaggaagttggtttaattggccttagcttccctgaccgtagacccaggtgctatccttttgattcagctttaggaagtcagcacgaattggcctcagattccgtgtccccacaccttggtgtttttcctggattcagcaccaattgtccttaagttccctgcctccagacccttattctccttcctgaagacagcttgaacttctgacccacagaactaggagctaataaatgagtgtagttttaagccaccgagtttggcaatttgttacaacagctgtcgaaaatgaatgtaatctacaaaataggagactgtcacttaggggagggacagtaatgcgttgtgagcacctggagggcagaaactgggtgttatttatttggaggccttacagcctgatatgtagtaaatgctcaataaatataagtgaatgaatcaatgaataaatgttaaaaggataagcaaaggagccaggctcagtctataaattaatgatttcccaaatagctgcagattccaggatgtgttcaaccgagaggcaagggtgctgagaggttagcgcttaagagtctgttgtctggagtctgaggtctaatctcagtttggtctgctagctgtgtgacccttgggcaagttacctaacttctctatgcctttatttttccacctgcaaagttaggatagtaacagtaactacctcatagggttgtcacaaggattaactaaaggatgtacctcaagctcttagaacagtggcttgccatagtaaatattcagtacatatttgcaattatttcacagatggaatcaaaatgatctgatttcaatttttgtttctccaacaaggtactcgattggtctccacaccccaccccctcatacacactcatacaccccctcatacacattccaaagcttcattttctcatttataaaacaaagagatgaacattaagaacattctttattttaaaaacctctgtcatgttaaaaagcagtgggcactgttattttaatctaggcaaagccctgtagttctcactgttgctggcttttcaaagtggaattcatcagcaaataacgttactaatgctgcaaatgagtggggctgggtggggttgggctggctctcaccctgccctccagatgcaatgagtgtggggacactggtgacttctacaaaggctcattgaaaaggtccagtccagcagcggcttggtctaaggtaaggcttcttttctcattgattagctgagcagggggagaggaagctattagttttattgttgtttttctttattggactcacaaggcctcaatgccataaacccataaaccagaactggatacaatctattcttaattatacagggacagatgatctgcattacaaattgtccacagcaaaccttgctcactaattattgatgagattgtcagtcacttgccctgcctaagctcatgttggcataaatggccccattacttactgcggacttagaaggccttatattagaaatgcttatgtgtggacatttctctgcctgcctccctagaagagaagttgcttcgcagtgggcactgtgctatctatgaaacacattgaatgtatgccccaaccatgaccttccttccagaacagaggaagggagccaagccagccattatagctatgtctgtattcagctctaagcatcaggacccaaactccaagacaatgcctgtcctgtttaggccagtgttttgcatcggtgtttagggaaaatctctataatagaaactatagaaggagaggggactgtcttagggcatgtcagaacatgcccagattatttcatagcccatagcaccgaacataccaatgttcaagggtgagcactcaagcagcttgtgaagccccaggtaaatgatgctcagctgccacggtttcattttattcagtcacagcatgggcaattaagaataaactgcatttgatttctctgtggttgagaaaggatcttgatgagatgtcatcctggggctgagtgtgtaggtcccaggcagacatgttctgggctcctggagctgagggtggggatgagcaagcctctgcttgggtttatctcagccagagctacaggccttttggattgttttctttcctgtgccctagccttgaactcttggcacagttcggaaatccgttttcataaaaccgatttatttttccatttatttgattaattgaaattgctaatactctggcctctaggtcataaacactggataataaaaccccctctacatctgtccagtattttagtgttcactaagcatttcacatccatcatctcaaaggtaggcagggaagggatcgccatctttagttcatggagagggtgacatgtgttgtcaatgattacagttagtatggagcagagctggggctggaagctggttcttagagtctgagtctagttctcttgtggggtggctaacaagagaatgaatggctcttgttgaaattattccagtttaccccaggactgagttgatttttaggatctgaggcttttaattttaaaactgggtaagttctgggcaaattgggaggagcttgtcactctacttcagaatcccagggtgtctgttgtgatagagccctgtcacctccatcaggttcaggggagggaggtggcatgtgacttggcacaggtgaggcagatgttgtacctggagcagccaaccagggctgctagctgagaacagccagaagaaccttatggatgatcagagagtggcaggagatccatctaagtcagatcttggggtggggtttgatgggttgtggagggacaggaggtactggtgatggagtgacccctcctgcctaggctgcttgtggagacagttcgtaggagaaggattcggaagcctgagagtgctgagccggagaggggacactaacaggaactgcctggcaagaaagacccatgagagagacaccgatggcctaaagacaaagacagggcagaggcaccatggtggattgatgggatgatgggggatggagggaaaacgtcagagaaggagcagacagagagaggagggagggtccatgaggtagtttcagttggagaagagttttggggccctcacttgccatccacagaatctctgtccttgtgggctacagcctccttccctccagcctagagattaaacccttcctaataaaccagccaatctaatttagttggggtggaaggagagggaaaatgatttgttcaaagtggcctgagcctgagctgagtcttgagctctccagtccaggttaatgggcttttagccttgaatcagggcaagagccaggcaggccacgtggctcatggatgtactcccttgtcagcctcactgtgtccttgacccagtcccaggacctctggccctgggaacttacatgccttccccagtctctgaaggatgggatctcatgtcttggttccattcccttgcttgttagcattttgcctttattaatttgaagaaattcaaatcttattgagaaatcattaagttaaaccaaacccagaacaaatcaactgagtagaaaattgcagataccagctgcactttttccttcccacccagagtggagaaaggactgtttttgtgattaccacagaggcaagcagggagagtgaggcacctgcactgggcatgtggtcaccatgtgactggccagaaagccccaggagttggttgcaatatgggaaaccgtgtaatgctgcagggaatataaataagacagaaggaatcagctaacagatgggatttcttatccttttttgttatggcaaccaggtaggatgttataacctgcattttagttttcccttctgcccgctagtctcgatgttttatctaatttgtagttttcttagtcttgatatatttaatttatatcttttactttattacatatatgtcttgaaagctgcttcaaatcctctgtggaacaaagtgaggaataaatatacagtctgacgagcctctccactagtgtcctttttggagcgtagtgccacagtataagactaagtaactagggaagaaggatggcggagtggtcatgcatgcctccgcaataccttgtctcagttggtgtgcagaagggggcactcagccacctctaagttgtgccagtgcttcctagactcaggagaagcaagtgaacatggctctgtgtgagctggcaaagaagagtgtccaccgcagctcttggctcctggcgcaaagtcaccctgtctcaggatcttattgaattgtgatttcatgaatatcctcataaagaagccagtctatctttctggagcttttttctggagcttctgggttctcatattttatattctcagtctgagtttaccatctaggggggcagggggacctattgtaacctgctcgggtgaattgagatacgtcttataaaattcttgggttattgcaatagcttcctaactagcatctctgcttcattcttgcctccctacaacccactgattgatcattaaaaaaatgtaaatcatcactatgccacttccctctgtagaaccttgcattgctcttggcgtaaaatccatggttcttcccaggctttcaagaccctgcgtgatctggaccctacatattcttgtctcccttgtcattcttcttttggctttctgaatatgcccaatgtattcctgtcttgagtttttgctttgcttcttcaattattattgcttgttacaggattttcctgtttcttcatgtagtaagttctttcttattctttaggtctcaaatctcatcttagacctgccttctctcccaatccatctaaactggctccatccctttcactctgctcgacctcaaaattatccatcacatcatgctacttacatccagcatttaccacgatctgcaattatcttctttattttctcatttgttcattatacacctctctgagcagtatataagcttcagagggcagagacttgatctgttttgatctcagctataactgagccacacctagcatctagcactgtggctggcatgtaggaagttcttaataaatatttgtgagattaatgtatcaatgacttaaaccaaaagttcacaaactatggctcatgaaccaaatccagcctgttgcctgtttgtgtaaataatgttctgttggaacacagcctattcacttacatatgttacatgattatgtattgtctgtggctgtttttggtgctaccatggcagagttgagtacttgcaacagagatcatatagcctgcaatgctggaaatatttactatctgatcctttacagaaaatgtttgttgacccttggcttaaaccataaccctaacaatggcttaatccatatgggtatttagcgtttcacttaatgagaaacagaagatctcagggtcagttcagtggctcagtgatgtcattcagaactcacagtcctgctattttgtgctcctctgtgctggaaatatcttgcctcaaaggtctaagatggctgccacagctgtacacatgatgtctttacacatcagagttgtaaggaaaaaggagtttagtgagagcaaaaactggctttcacatgctcagcgcttgcccagtgattgacaagaaggtgattgactgccatgattggcttagattggcttagattggccgtgattgactgccatgattagcttaggccagtcatgattcatgccttgaggttgggcataacacttgtagtgagcagagaagaaggcagacctctgtccacttgtatgaatgaagcatactcagtttcctcaaactcaaggtggttgtgattaaggactgaagttgtctactctctccccttgatagaattagaaatggatgggcacattattactcttttttccttttctagctttcagggggatcttctatctaatccttcaccctcttcaccattttcctcccactcgctcccagccttgaccatgtaacataacttcaggcaagtagatctcagctgacttcataacagtctcacttgattcagattttcctaagaggacagcctggcctcattataaagatttaggaacaccagttgggactgtaaaatgttcccaattctattccccaccagccaagtctgatgctttaaactccactatgcaagggacattttagtttaatgcattgttgttcagaatgtctctgttaaaatgaatggtattttcaaaagaccatgcatgatgtgagcttatggcttaatctcaaaggtatgacatcacatatcatcttggacaacagaaatcttgaccttgagaggagcagggagaatgttatcatggaaatagcacagaatcatgagatacctagattccagttcttgtttgtctgttgctctgttatccaccttaggtaaattcactttctctttctggacctcacctccctcatctgtttgatgaaagagttggattcagtgatctttgagggccctttcagctggtgaagagggattggccacacactttgtacagtttcatgtccacatcactgccttcattcactccttatttcttgagccattcttccgatccatatttattaagaactttccatgtgctaggagttttcctggatgctgggagggtagcactcctgctctcttgaagcttactgtcgaatggggaagacagaaagagtaaacaagtaatataacaccgtgagacaagtgtgaggaaagaggagacaagatcgcatcacaggctcatttcagtccaaggcagagagggaaggtgttaccttatacaaggggtcaagtgtggctccccagatatggagatgtttgagcctgaaggaagattctgagttgactaagctaaaaaagtgtggtgggagaagaatctctccagtaggggtattggcatgtgttaagaactgttagtaaactgtgtatcatttatgctatatcaggttcaccatttctcagtcaattcacttgctgtgtggcccattcaaaatgacaatggaaagaagaatcagataaatttaagaagaacctgagccaagtttatccaaccaatcaccactgggatcacagttaatatctatttcattacttaaataaacatatactatacattttaagcatgccacgtatatcagattcattgctttaaaatagaattatcaaattgtcacagtgtgctaggcacttggccagagccagagaagggaagtagaagaggacacagaccatagtctccaggagctcagagcttagtgtggagacagttgagaacattaacagcacgagtacagtatgttcccaggcacacagaggatgctgacactatcaggctggggccaggaaagctttcagaaggccatgagccccctgaactgaaattatttcttatttatttattttactgtggtaaaataaacataacaaagtttattgttttaaccattcttatgtgtatcattcagaggcattgagtacatacacaatgctatacaaccatcaccaccatccatccctagaaaccactcatcatcccagacagaaaccctgtgcccgtgcagcaaacactccccatttcccaatcaccccagctcctggaaacctcgattctactttctgtctctgtgaatttgcctactctagacacttcacataaatggaatcacacagtatttatctttctgtgtctggcttgtttcacccagaacaatgtccttaggattcatccaagttgtattacgaatcagtatttccttcctctcaaaggctgaataatattcatatatatatattcacacaccacattttgtttagccattcaactgttgatagacacttgggttgtttctaccctttggctactatgaacacagctgtacaactgtctacttcagtgcttgatttcagttcttttgggtgcatacccaggagtggaattggtagatcatatgataattctatttgaactgaattttgaaggctaagaatgaccaagcaagaggaagcaaacacacagtagattaatgccaagggaggatgcatttctgtggggtggtccacccatcatataatctctcacttgtccctccctcaaagagcatgctgtgtcccactgtggctgcaaccaccagctcagttcctggtttccctagaagtgcgactctgggttcattcaggaaaagagggtggatcatggtaccctgtgggacatgccctcctttcctatatccttccctacttccaccccaccaaggaacatcctgggtcttttcattcccctgcctacctcactgagttgttttgaagatcaaggggcagtatggattgaaagtgctttataccttttaaggcagtagtagatatttgtggccatagctgttgctattgtcattgttgtcctctttgttaggaccattgtgagcctccagtgacctctcctggcctgaggaagcaaagggggagtcatcccagccccctgcacaggtacttcatcatggtgaggaacaggtttcttatttactaccaggtctgctaggctcatgaaatgaagctcaggtagaacaccttcaatggctgtgtctctacaccacatcccaatctctacaccacaccccaatctctacaccacaccccaatctctataccacaccccagtctctacaccacaccccagtctctacactacaccccaatctctacacaacacctcaatctctacaccacactccaatctctacaccacaccccaatctctcctgacaccaaagtctataatgataactgatgaaaacagagattcactcatcacatcctgagacatacaaaggaagccaggctgccgttttcacttagagtgtccacaggtctgcatgggagaaaatttctagaaattctggagctgtagtcttctccctccaagagttggtttccaaagcttggtttacttgatttcaaacatctaaaccataggtactcaggaacagctgtgtgtgtttggcacattgctagggtctgtgggggtagagaagcccaagacatggggtcttagccttcagtctggtcattggcttcattccaacgtgctcaaatgcttgatgtctatttcctaacacctctgttcctgttttctgttatattctgctgttctgggctctgagggtgactgccatcctctgctaaaaggctgtctacttttaagtaactcctttgctttcatttgggaaagctgtctttcagttactggctgcctgtctggtttctacctatagtcaatcaaaacacaggaaactgtctgacatggtatatgataagattcggaattgtgtgacacataaaattgccccagagtccctggaccactctagacctctgatagttagtaggggtccagtttccccttaggctcagaatggcaaatagatgccactggggctgcatttctctgcccccagcagacatggttaatccatcttggtgcttttcagctgagccaaggcttggcttctgaccttttctcagtgcaaagctgtcggcagccgccatcaatcgatctgagttggcacttagagtatgtagcagacagctggtgtctcactccaatatcctttctgggccatccccccagctgctaggggtagtgggtctcacaacccaccattgcacctgtctcctgagaattgttctctgctggccctgataggagccacctcaccaggaaatgtctcagatcttatgtcttgactgatataggggcacaaaagcctgatgcccttgtctcaaagtggggccactctgtgatgctatttgtacatattgatattcctgggatcaagctgagaatgactgtagctttgctgagcccctctccttgctcggtcccccttccctcacatccttacagcttttgttttagtttgcttgcaccttcaacagatcactcacacaagaatcctcatctcagggtctgttcctagagaaacctgagctaacctaggtcatctgccatacctgccctgcctctgctcctatacctaagaaggaaaaatcaaggacaagaataaattgataatgtgcaaagtttcccattctctggctcctgtacagtaaacaaaccatcatcccacaagtgtcttctgggctctggactcgtgccaggtactgtggtgcgcactgaggacacaccagcacacaagaccaaggagggcccctcctcatggaacttccattctatcttagcttgcttttcctataccacttgcattatctgttccatgtatctctggatttcaggtcaccattgaccccctgctctgtgtcccagtgctggcattctgccctattctgacaaagatcatctgtccgatggttaacttagtcttaaccttggtgttcactagctgccggagccttctctggtttgctctgattttaggccagcctctatctcataccggggcatatgtaactttggagatggctgggtcaggcacaagcctgaagtgagggaagcttagagggggtcagcattgtctatagtgagttagaatacaacttacaataccatcactgataacatccacttgcattcagcactttgcgatttacaaagcacttttatgcttgctatctcatttgcttctccaacaatcttggaaggtagacttaattagctctgtgtacgtggtgagtaagcttaaggatgggtgtagataggactggactgcgagcaggaaatctctaccccggaccaaagtgaaggaggagggtagaatggaaagaacagagcagcttctgaagcatctctcaggagacagaaggtcaagtagcagaatcaaagaccttccactgccctctcctctgtcttctgttcaactcagggagtagaaggtctttgaccctattgcttggccttccatctcctgagagactcttcagaatccatctcttctttccattctgctgtgctctggtgttctcattatctgtagcagaagttttataatttgcagcttacagacccctagagattcacgggagagtttcagagagttcataatcccctttccccaaattgaagtgtatgtctatttttacctgcaaagtagttcacacatttcacaagatccccaaaagcatctgcaaaccacaaaagtcaagaatcactgcttaggttttgtggccaggatatacaaaggacctgagatgaggacggagaaaggtttttgataatatcaaaacatccactgcagatgcagcaattgtatgtgcaggcacagctgtgatgtccatggaacatctggctgataaatgaattttcctctttccagtggttttgaatcatgcagtgacagatttttagagcgagatgcctgttcactgctgggcacttgattgtctctctgggtcccctcattggtaaaaaaaaaagcacattgtggctaggttatcttcaagggctcgcccatcactgatgttttgtgcttttgtaaagagcctcagaaatcatctctttcaggatctatttaaaaggttgcagcatgcagtggctaagggtgggtttctgagctagaaagctcaggttgcaatctcagctttgcctcttggtcaggttttctctctgggccttggtgaaatggtgataatgatggcagcttcccgtagggttactctgaggaggacaagagtcagtcatgtgaagtgcttagacgaaagccagccacacagtaggcacttcatctgaataagtgttgacttttgtgtaatttgcacatagaagagagaactgaagggtaataagtaattttgaaaaggtcaatacagtgagaaagaacaagcctcagattcttgattcctagtctgtgcacctccctgactgctacacttgctatggttcttcatttctccaaagactgaagattattctcagtatctgcacagccttagaaaaccccattccctaggcctgctaataaatcaatattcagggagttttaaagacctctgtaagggccagacagcacctagtactattattttctattcaaattttcatccctattccagccaagtcccaatgtcccatctttggacactgtcccatcaggaagatcctgctgtgtctcagatgcaagtcatcttgctagatcttagctcgcgtttcctacaccatttgcattgtctgtttcatgtgtctctggattccaggctgccattggccctccactatgtgtcccagtgctggcattctgccctattctgacgtaggccatctatcagatggctgactcagtcttaactttggtgttcaccagctgcctgctttcagagctgtctctggtttgctctgattttaggccaacccccatctcataccagagcaggtacggctctggggatggctggatcaggtgcaagtctgaagtgagagaaacccagtgaaggtcaacattgtctacagtgacttagaatgcaacttacaataccatcaccaataacatcctcttgcattcagtactttgcaatttacaaagcacatttatgctcactatctcatttgctcctccaacaattttggaaggtagacttaagtagctctgtttaggctgggcacagtggctcacacctgtaatcccagcactgtgggaggctgaggcaggcggatcacgagatcagaagatcgagaccatcctggctaacacggtgaaaccccatctctactaaaaatacaaaaaattagccaggcgtgctggcgggcgcctgtagtcccagctactcgggaggccgaggcaggagaatgacgtgaacccgggaggtggagcttgcagtgagcctagatcgcaccactgcacttcagcctgggcgacagagggagactccatttcaaaaaaaaaaaaaaaaagagctctgtttaagcggtgagtaagctcaggcctagagaaattgagtaacttgggtaaggtcacacaatttttttttgaaaaagtaaaattgatggcgaggtgcagtggctcatgcctgtaattctagcactttgggaggcccaggtgggatgatcacttgagcctgggagttcagaccagcctgggaaacatagcgagacgttatctctactaaaaattcaaacaaaaaaattagctgggcttggcggcaagtacctgtggttccacctacatgggaggctgaggcaggaagcttgctagagccctgtaagttgaaattgcagagagccatgatggcaccattgccctccagcctgggcaaaagagcaagactttgtctcaaaaaaatgaaaaattaaaaaaggtagaattgaaaaccaggtctgtctgacctgaagtccgttttcttccagctatgccacagctgggacgtcagagggttattaggtctggagtaagtggaaagaagtcagctagtttgggaagagcaacaagatctcaggagacaagagggctaaggctgggagcccggttgttctaaggcactacagtgtgacagagtacaccttagagagttgggcttcttttgccttcccacttatgtagcctttaactgcgtaagaagcattgggagcctcagctataggggcttttatttctgtttcttcatttcttgtcacatctcccaggaagttctattgtgtcacagagatgagcataggctttaaaactaatcagatctgagtttaaatctttattttatgaccaagagatattgggtaagttactcagcatccctgagcttctgtttcttcatctgtaaaaatggaataaacacatctgccttgcaggggggttgtgaaaattaaattaaataatgatgcatcgttttcaggaatacttggggtggaatgacccacaaaggggtttaacttcttggccagagaaacccaatgggccttcccatgagaggctgggcccaggcctcagctgtgtcttgccttctctgggctctacttattttctggagcctcttctgttgcaagctaaatagttcctccccctcagtagagtctatgctgtttcctctggctacagactctataatgctccttgcttagcagttgcttagccaagctgggccaattaagctgcattcctctaattgttttggtggcttttctcggaactccctccaatttgtctacaaatcagttctaaatttagacccacccgccaaatcttggagctctgagcttttcactgctctagccaaccatgaggctcttctaccatcagtgattgagtttgggggtggttctcttcctctctctcttctccttcctctaattatcaacatgtaggcatgaaatgactttgtgacatgctttattttgtttgtagagtgcaggtccatattcagttaccaaacagttattcgtatttaaactcccaggaaaatgatggtagagaattaaaggtgggattaatttaaatgcacaaattatttttacattccaaaactgcacagagaaaacaaaccaattttgatataacgggggagaaaaggtaagagggtaggagcaagaataaagttatttgctctctgtgtttttgtgcctcactccctgcactttttctaccttcccagtttgcattcaccaaagtatcagcgcccccggccttggtgtgtctaacacaaagaacctgcagtatctttgtcaggtagataggaccctcccaacccccaggagacaagatttcaaagatccctattctccctccttttttctctccctcctccttccttttccttcatcctcttctcctctcttcttcctcctccatgtcaatatcaaattcattgccaccagccatcttttatgctaacagagtggcttatgctcttgaaagccttttcatagacacagtctcatttgaattgtacaagagtcctgggcagggccagagcgggtacatagactccgtttgacagatgagaaaagagtactccagagaggtttagcaacttgcacaaagtcaaacagctcatggatgagctctcaaaaagacccaggatttctggcttcagccttggtcacagctggtgctctacaaacatttgtcagatgagagaattctgatctcactgctggctaacggatcagatcaacacagccaaaggcttcatgacaggctggcaggctggcaggctggcagagaagccagaatcttccgttgtctcagagcttcattcccatcaacccagcggacacctgttgactgttcccagaaaaccactgcagacatgtttctttgttgtcagcagagtccccatggacatctcatgagtctttgaggatgcccacagggccctgcagggaaggagacatgatggctggctggaagaaatgcctccacaggtggcggagagtttttttcacctactgtagactccaagtctctttctcttagggcctcaaaggcatgttagcacatacatttaacagcaagtgcttggatctaacaatattctgagtgcataggacatgtagaactgacaatcctgcttccctgtatagatgacatgtccctgctctgcaaaatgggcctctcacttctatatatatgacttagctttttttttcaagaatcaggtgggataaggagtttaaatgagtttacaaaacagaaagttctatataaaatagatgataattctatataaaaactcctttgttgctgtaattacaataatcctagcggtaaagttgaccttaatacgtgatggaatcagcgatggaagagactttagagtcacgtttcccaacccctgagtttgtgggtgagaacacgaagctccagacagaaatgatgatcccacagggccacacagcaggtgtcaggagggatagttttagaactctgtctcccggctcatccccttgtattctgtccttttgttttggatgctgtttgtaacatctatttttcttaccttaatttctccctctttccttttctttcccaaaattcaatacgtgcagaatgtcttccaaatactccttatccacaaccttttctttctccgaatgtatctattttatgtcccattacctcacaatcttgtgatgttgctttaataattaatgaatccatgctgacaggttaaaaaagaagaaaccacaatgaccaactgtgccactccacccagagagcatttcatttcaatagacaccttcacatacctccaagaaagagaaatgactattcatgaaatttcaaattctgtggcacaccatttgggattttctccagattgcacattgattagggggttcatctcgcttttaactcatggttgaatatgtggctgccttctcttattggctaattgctctaaccttctgagctctgtgaccctgactgatggcactggatatttccacagccttgtccaaggaggcctccaccagcagggctggtttctgacacagagtgtttgcaggttattccatattctttgggtcaagaatggagcttgagcttctttctgcatgtcagtaattagacccaataggttcccagtgagtgtgcatgaaattgaagggtggtgtttcttcaggatgtgtttcctgggtgaagactgtatgtgaaaatgtcagggctggtatcaaaagaggatttaaaaagaaaattttactcaaggagaagaagcaaatggacagacaattccccacttgatgtcagtcatctggttcctcttttccttcccagctgggtcatggactttgcatcttttcttgcatgtatagagcctattacagatcctgaaatttcagtgttcagtgaataccagtgctgggctgtaagacattggtgcctccaggacaaggaaggatgtgccccacaatcaaagaagggggacaagaaagaatgagatttcagaacttggaggacttcatttcaacagttttggaaattacctagtctaacctccctcaactactttgtcagggagtctgagactgcctatagggtatgcaggaatgtgtcttgctggaaacagatagcaccatttggactgtgtgagtgtgcatgcaccttacgcaatcaacaaagggctgcgcctgtatgcacacatatgcccatcttctccacagggtggacaagcccaggacaagcatccttctctgtaaaatggagccttgatatctgcactgtttacttcacagggttgtgaagagggtcagtaagatcatgctttgagacacataagaaatatttttttgaaaatgtgagtgaaaccttggtgtgcatgggattaggtgcacaactagaggaagctgtgcttgctaagaacaggcctattttgtggtctggggaacaaaagatacctcttgccctcaacacacaaccctgaaggttggggaggccacagccagctgggaagggagaaaaggagcctgatgaggtatgtggatgaggaggttgtggtggacaagaagggatggccctgtctcaggacatgtaggaggctgccttatcttgaacattctccagaataacgggaggtcacctggggtgctgaggtcctcaaggccaccaggtctggggctcagaactaccggggctgagtgtttgtgtatgtagatgacagctggcagatgtggagtagcacatgggtaggaaaacagactaggagagtgaaagacatttggctgaggctgcataataggatgtgtaaagtgagggactgaacacaggccagtgtggctccaaacccaggatactcttcccagcatcacaaacagagcagtggaagagaagagggctgttctgtgctgaggagacctgaagcccaaggaacaggccttccctgtgcttgggatgaagaaggtagtggcctctgattgcatccttgctcctctggggagggttggtgagctctaccacccttctagaaaggatggctcagacttcccactactctcctttttctccagtttctttctccagttgctcaagttcaaatccttcctgtaacccttgattcttctttttctctccttgtgagctgttcatttgaaatatgttcagaaacttaacagttctcgccatcttcactgctgccatcttgtccaagccccatcatctctctctggtctcgtgcatctctctgcatccacccttactgcctgtcatcttgtctctgcacagcagccacaggaatccttttcatgggtaagtcagttcctgcctctcttcagagggaaaccccaaaggccctactattatttgaatgtgtcccccaaagttgatgtgttggaaacgtaattattgcaggaatgggctcctgataaaaggatgggtttggcctcctttcctctctcttttgtccttgtgatgccttctgcatgttatgacatagcgagaaggtcctcaccagatgcaaccctttgacattggacttcctagcttctagaaccatgagccagagaaatttctgtttattataaattacctggtctgtggcattctgttatagcagtgcaaaactaacacagaaaattggtattaagaagtgtggctattgctataacaaatatctgaaaatgtggaaatggctttgggactaggtaatgggtagaggttggcagaatttggcaggtcaggctataaaaagcctatattgcaataaatgaagcattaacccatttatgcctgaggtggcaattttttttaatttttgcaatcagaccttggtgatgaccttgagtgctaggatataaataactaccacatgcttagtgttccaataatggaacactaggcataattaagggcaattctggtgagggctcataagaagaaaaaagtcatagggaaagccaaaatcttagcaactacttgagtagtcataatcagaatgttggtagaaatatgggtggtaaaggccattctgaagaggtctcagacagaaatgaggaagaagacattggaaactggaataaaggccatcccttttatatagttgcaaataacttgatgacactgaggacaatggactttgtggaaggcagaacttaggagtgatgaactaggatatctggtagaagaaatatctaagcagcaaagcattcaaggtgctgtatggcttcttttggccacttacagtaaaatgagagaagagagaaatattttaaagatgggatttataattaaaaggaaagcagaaaatacaaattttgtaaatgtccagcttggccacataaagaatgaaagagtatgtttaggaaagcaaactagggtgtatacaagtgaccatttgctaaagagactaatagaatagaagggaggcaggggctatttaccaaaagaataggagaaagaccctgaaggcatttcagaggtcttccaggatgtcctttccatctagggccttgagagaagggtttccaaagaagtgcccagaggacctcagcattcactgccctgcaccacctttgggactctgctccccacattttggcacagtactctttggttgccccagctgtggctcaggcaggcccaagtgcagctcgtactcctgcttcagaggtacaccttggtggtgtttacagggtgctatttctgcaggtgtgcagaaagcaaagctgtggaggtatcgtggcctctacttagatttcaaataatgtattggagagcttgggagcccaggaagagaacttatcctggagttaagtcactgcagaaagttcccactagggcaattcctagtggagtcatgggcatggggtacccagcatgcaactccagcctgggaaagctgcaagacaagactccaacctgtgagagaatgagtggattgagcctagcacagccatagcaatggggctgcctgaggcgttaggggcccaacctccacccttgtgtgcccgggatgcaggacatggagtcaaagcagattattctccagctttaagacttcgtgttttccctgctggtttttggacctactagagaccagttacccctttcttcttctctatttctcccttttgtaatggacatatctatcctgtgcctgtcccatcattgtactttgtaagtgtataacttgttaatttcacaggctcacagcttgtctcaaagcttctcttcaaattcacagaaaataatttatctcaggacaaatccttgggtctcccttatgtctgatttagataagactttggagtttggactttcgagttgatgctggaataagttaggacctttgggactattgggatagaatgaaggtattttccatatgaaaagaacatgaatttttggagccagaagccaaatgctgtggtttgaatgtgtcccccaaagttcctgtgctggaaacttaatccttaatgcaacggtgttgagagatgggacttttaagaggtgcttagttcatgatggctcttgcccttgtgaataaattaatgtcattatcccaggagtaggctcctgatacaagaatgagtttggcccccttcgctctctctctctcatccatgtgatgccttccaccatgttatgacacagcaagaaggccctcaccagatgcagcccctcaatcttggactttccagcttctggaaccatcagccaataaagtttctgttcatcataaattacccagtctgtggtactgttatagcagcacaaaataaatagatgcccccacccattcataggacaaggccctcaatgagctgcatcacccacaaaagacctctctggtctcacttcttcctatgcccttcccctgtccttgctcactggctccagccacacaagcctctcctgtctcaggacctttgcatggactggtccttatacctgggtgtgggatccacttgacttattgctatagctctagcaatggggcttaacatgggttcaagaaatagctgtggaatgaagttcaactctttctctcatcattctttctaccttgtacctttttcctcagtgttttatcctccagagcccactctagaatcctcgcaggggctctaagaggaaggcctgagccctttcccaatatctcttatgcagagagggagctggagggcacagagtgtgaacattttcaaaatcccatgccagtcttcctagctctgcatttccccaccacctccagaagccccatcttcctctgtgtgccatgcttttctcagccctccaggcaagagtgatgaagtcactgttgttattcactgtgactggttgtcatggcaacagggccaacacacatccacagagcccccgtttagtgtgcaccaggggtttagcaaggtggcagtggtggtggtgggagtggtgggggtgttgggctgcttgtatgggtttccccactaaggaggcatctggggagagagcctgattgggactccaggacagtggcatgtgcttacacactgcttggaaggagcatgatcccaacacaaaggcaccattaactgcagagaagcttgcacaggggccagctagttgcagcccctgggaaaaggtgctttttggatcatggcctgataggctctcttcctctgcctgggacttggctgatctggcccagcacccagaagagaagacagagagagaaacagacaagagagaaataaatgcatggaaaagtgaggacatgaggccactcacctgtttaaacccagatgtgggctcttgttaactgctggggttgggtcagaaaaggagaagtcaaaactggattctagatccttcccctgagataaaggactgacccatctatatgagttacatattagttaaagtagtattaactgctgtaaaagataaactcctagatttcagttatttaacccaatagaagttcattccccactctacacaaagtctaatcagcattactgaaggcagaaggagtggaagagtgctcagggccccaggctgataacaagtctgccaaaatcaggtggtttccaaggttgtcttggaccttggcatccagcagacagactgtgaggaaaagcagagggtcacgtgggaggttttcaggactggtctgaaagtgggctgcctcactctgcccacatcccattggctggaactgtcacatggccctacctagctgcaaggcggcctagaaaatgtagtctagttatctggtcagagtctctgctgcaggctgaaagggagcctggccctggaggctgtgtcaaggaaatggactagaggtggacattgcccacagccagacaggaaggggcccccaggcatgcaaaaaatacctagtgataagaaccattcagaattagaatccagattggcctgactccaaaatctttggttgtttgtattctgaggcttcctcctataggaacttcctggattctgttgaaaggagaaaggagagaaggtagggaagaggtggagtggacatggagagcaggtggtgatgaagtgtcagcctggtctagctccttgggtgccctgtaagctttgcccacgtttaggtgctcatgagggtttccgctggaaactcccttaccattccctttgaagctagacgagaactcaggttaatgtgcacaacggtggcatggcaaacagttgtggagcacagggatggaacacaaatgacagcacaacagaatccaggaacttttggtccaaactgacagggcattccacctgaggggtggagtgaattgggtcctcagagaaagaggcgagggggttagattttcatcctggaggtggctggaggaagagcagcccaggagagccaggtagatgggcacaggaaagaccgctaaaaggagaggatggaggggtctcagggtggaagggaggcccatgtcagacccacctaagcctttggtgtcaggcttttcaaaggtggggcttcagtgtgaaaaatctcccccctaaaactcgttctttccctgagtggtataatgaggctcagaaggaggaattaggatgtttccaaagtcacaaagctagttagaatcagaccccagcctagaaccttcatctcatatctcctgggtcagtggttgttctacttctataattgccctacacacatatattacttcattctctctctctctctctctctctctcaagttctgaggaacccaggtagactttgaatctccagcagaaatcctgacactctgacagttggaggctgatttagctgcatgttctcataattgagtctgtaacttgcacagatctaatccatatttataatcttacgttgggcaagtgataccttctgtgtctgccggcatggcaagagccctggctgcaggttgcagtgcagaagcgggtctctgctgcagcggggagcccaggaaggaagacccgtctcatctctgagaatgacagtgctctccctgagtagctcctgtgcagggtctgtttaaaaaccctcagtgatatgcaaaaagagggtaggagagaagttgcctgatctaaattatataaattctgaattatagagaacttttaaagatagtagtttttatcactttcaaggcattcaggaaccaaatggacagataggaagcaaaacaagctcaattagaggcactctgaggaccgctttaatgaatagaaagaaagtcctgtgtaattaacatgctttatgctgctaaactggtattccatgtgttgaaagctacctttttaaaaaaagaaatatgaaattatggggtggcaacaatgtatactattgctctgcatgaagaactctgatttgcatgtagtaaaaaaacactggccgagaccagactatcaacagcgctaaccaaggagattctagatcccgctgcaaaccttagacacagcacgtcctgcctccggcccccagcctcagcccaaactgggtccctggcagccttgccatgcattcatgctcatccccctgtcttagacatagcacccttttctagcatgctccccctgtccccactgagtctcgggcaagcctctgaactcaccagctcccactttcctggggtgagtggcacaggcacaggagatattacaatgacacagccgtgagactgccattgatttccagctctcagtctctgctttaatccatatttttattaaacttttttgtgcaggaaggaatatttagggaaaaccatgaagggctgtcaggcgctgttattagtcttctcagctaccaccaatgagctgttccaggcagaaatatttgccatcagacagcggacccaggggccagcttggaagcagagctgatttggccgacagaaaggagaataaaagacgattctcgagatgccaggaggacaatgggagcagcagtttccaatttatttcacttctattgaactctttttagacctcagttcccacatctggtgagttggcgccatccttctcttagaattactgaggcttattgctggggtttagagagcatccaaatcactccacacagctttatttggacctttccaggtgtgaagcttggggctaggtgctgaaatacagaggcatacgggctccacagcagttcatgcaaaactcctttcttccactagagttcaaggctaagtctttaaagatgccccctccaacctaccaccttggaactgcttctatttttatgtttattacagtattaatgtggtctgtgcttcttctccaactacactgttgagggcatggcagtgtctatgtatgtagcatagtgcctggcagatcctggacaccaagagcatatttactgattcatgaatgaatgaatgaatgaatgaacaaatggcttaatgcaccacactgaaacattcaaatcctgtagtacatgttgagaaggaggagggtatataccaagggaaggcaagatgccaacaaagggggctgagaactccaacccagggtctggaggtcctgaggatctccttgcttctttcacacttccatccaatcccattctgtggtcacagtgcctcctaggctcatcctagtctatgcctctgctgattctccaccagtgtgggtgttgcagagcagtaaaggtgtgcagtgtgagaacagcagagctattctctgggggagaggttggaggagcatgtaccaagcccctgctgaatccctagtaccaatttgacccagtggctgagcatcctgcagaaaatcaagacactcctgatcgggaggagcattaattaggatcacaggacccaggggcatggaacagcctgagcatgttttagggagcagaccaataaaggccaaggaacaaggtaggaacaacaacccagggtgtgcaggatagcttataatgctctctgcccaaacgcaacctcctgggggaacgtgagcagtgagcaatgaataaatcgggaagaaacatcaaccctgagggtgtaaggcagggaggaaactcacattagggaccacctactagggccaggctctgggctcactactctggatgcaaccccagtggccccctcccacactccctgcactgatttggaggccaaagtctcttctcattacacccactgcagcagaatccggcagtccctagaggactccgaggcgatctttcgaaagctgtttgctctttcccttgggaaatgggccatggttgtatttttctttctcattttctgtgtgggaatgataacagtaagaatgatgtctacatctccccgatgagggaaacagtggcggcatctgtctgtcactgatccctgccttgtgactctccatcagctcaagtcataggtgactttcattcataaagagagctgccctagactctagcaaaggagctttggaccactcactacagaaatctgagcaaaattgtggctgagaatgaggctacctgtgacccatctgggcaccgcattcttagaacatcagcaatcaggagtgtccctgggactcaaatgaagaccctaataggaacttctggagggactgagctagtttaagctgcagataggaagccttcaacctaaaggaagtgttcaaccggaagactttgccttcaacctaaaggatcctacccatgggctgtcaggacaagaggaatggggcttactccatgcaacctaacggacagaagcagagtcaacaggtggaagttataggaaatacaatcgggccaaggaaaggaaggtattgggactctcaaaagatgggctcagcatgatggcagcttgtgtctctctaagcagaacaccccatgagaatggcgttacataggcttcccatgtgcttatttcctttaactctccacgttcccatgagaaggatcaagctcacactattgcccttttttagagggtgagtgtgaggttctgagaggtcgagtagtagaattatctcccccagtatggggtagatctgggtttgatcccagtctgctgctccttccagtaggccctaaggcctagagttcatataaaagtctcaggaatgttggaagagactcatatattttcggcatctccaactgtaggtcgtaggaatccacacatctaggtatgtggatttttaactgggtgaactcagttctggccacttgactgccctgagcctccatatccttatatgcatggtggggtggaattgccttcctcccaggattagtagtgcctgggggggtctctgagacccaacccaggatgatacagtgctgggaactctgggattctgtttactctctgggcaccagttgagaagcaacacaggtctcctttgctctaagatcccaaagatttgaggaagaggagagcttttgtgctctccttgcctctctgaattaaatgggtatataataggatacagagcccttcaccagtattaagaacttccttacttcttctgcattcgttcttcctataccttacctggctcagcctaattttatttccttccaagtcttcttaatgtatatttggactttggctctttagcccaaagacctaggaaatgatgtcattatcctctagttctaccctggcaattctgctaaagcaacaggtatcttactttttgtctgccctgatagtgagaatcatggggcagtgggtgtgaaggaggtgggggcacatcaggcaagctcttcacaaatatcatcctgccacaaagacatgtcttcactctatgtacttacttctccctatctctttggacgctgttgtgacttaaccatcatctcccacctgaactactacaacagaattttaaaagctttccctcttagttccctccaatccattttcctcagggatgccaaatttatctttgtacaaggcaaaactgtgtcatgtcaatcctctgcttaagagacactgacggcttcccaatgcacttgggataaaccacagaatccctgcctgctcccgctccactcctgcagcctgtctaaactcatcgtgactgccctcccgcttgccctccgagtcacagtcatttgggcctccctccagttcctcgagcacaccaaggacattccttcacacatgttggttcttcttcctggaattcttcacatcctgatcctcccgtgtttcctccctagctcatccttcaagcatcaggttaaatgctgcccccaagctcaacccagtagaagccttcctgcaaccccagtctaaactggatctcccctgaaattccctccctcttattcttcactgattttatcatagcttggagttaagattcattttggggtttggttgttccttccaaaatgtaagctctgtgaagcagacattgctgtcttttcagccttgcacctgttaaagaagctcaccttatctgtggggcacatgaagaagaaaggagagggagaagaaaaaggaaagggaaatgacagtaaaatgtagaagggagagaagagtaggaaaagcaagaaggataagagaggaaggagagaggggttgaggaaggaaaaagaggtagaggaggggaggggggaaaataagaaccagagtctctctagctggccacaggcttccccctcctcccggtgagcagcctgggagtcggcttgattgctggcaccctcgcctgacagatggagcttgtgcacccaccatctctcttcactgggaccctggacagaggcgcacacacacacacacacacacacacacacacacagatatatgcacacacaactggatgcatgccttgagtctgaaagaagcagatgcttattctttctccctattttgcctctgtttttttgagacagagtctggctctgttgcccacgctagagtgcagtggcacgatctcggcttactgtaacctccagctcctgggttcaagcaattctcctgcctcagcctcccaagtagctgggattacaggtgcatgccaccatgcctggctttttttgtatttatagtagagacggggtttcaccgtgttggccaggctggtcttgaactcctgacctcaaatggtctgcccgcctcggcctcccaaaatgctggaattacaagcgtgaggcaccacaccccccaccgcccattgccccgcaattttgcctcttaacctgggctcctttccctaatggtctgagtattatttttctttttttggacataacaaaaggcataaagaaaggacaggacgcaattggaaggtacaccatacaaatgatgcctagcctgtcatcccaacactttgggaggccaaagtgggaggatcagttgagcccaggagtttgaaaccagcctgggcaacaaaaagagacccccagattctgcaataaataaataaaaaataaataaataaataaataaataaaataattaaccaggcgtggtggtacacctgtagtaccagatccttgggaggctgaggtgagagaattgcttaagcccaggaggtcgaggctgcagtgagctatgatagcaccactgccctccagcctgagcaacagagcaagaccctgtctcacaaacaacaacaaagaaacagaacaaaaagttcccacacaactggtgcctaaaaaattagcacagaaaccctgtaattccctccaggcatctaggaatctggtggaccagcagactgatttctgggaattggtgtggtggctgagcaggaactcacaatctgctaaattccccagacttcaactaatcagggaggtgagagaaagcttcttagacctctgctttcctgctgctagctgctgctttcccaactagccctcctggtgctgcctggtccccttccctttccccctctcctgtccagatttaaacaccagcatctctaagcctcagagtcctggtctgtgctggatggtggatgactggccattaaaaagtactggttttggctccagaaacctgggctctgatctatgttctgcaagctcacacgcgacccttcccctctctggaatccagattgctcatctgtaagatggccttcaataaccctgggatccagaccttgtgttctatggttccagttagcctgctgatagggccccatatccgtcagttgttgctgataacaaaaaccttaaaatctcagtggcttccaacagtaattatttttatgttcactggtctgtaggttgactgaagtttggctgatctgggctaggctaggcagggtcaatccagagcccaggtcaagtgagattcaaatttgctccacgtattcttattctgatgcccagactaaaggggcagtggccatctggagcaagatcttctcatggcagatcacaggggtgtgagaagttaagctagattgtgcaagcacatgcaaaacctctgctcacatagcatccactaaaatcccattgccctaggagagtcacatgaccaaggccaactcaatggggtggaggaatattctctggttgctctagtgggaagtggtgcaaagtagcaaaaggtgtattagtttgagttcttactataaggaattggctcatgcagttatagaggctcagaagtccaagatctgcagccagcaagctggatacccaggagagccaatggtagagctctagttagagtctgaaggcctgaggaccagaagggctgatacagtaaattctagtccaagtccacgtctgaaggaagaagactgatgtcccagcttaaaggcaatgaaacagagagaaggaattctttcttactcagccttatattctattcaggccttcaatggattaaatgaggcccacccacattgcagagggcaatctgctttactcagtctactggtttaaatgtcaatcttatccagaaacaccctcacagacacactaaaaataatgtttgaccaaatatctgagcaccctgtggcccaatgaagttgacacaaaaaattggtcatcacaaagggctgatacctgtggttcttttaccaggagtgggtagaaaactcagagcaatgaactgatgctctgcaagggctttgagagattaaaaaaaatggcaaaagggcgttttggggatcctggccaaacaatgaggaagagagtttgaagcaaggattcttttcatgctctacacattttgtcacattgagaggtacctattctgggtttcctgcttggagcagagagtatcagtggtcaccagtatccctgtgctcctctacagttcccagcctcccctgcagttagattggtcacatactagtgctagcatgtgcgcagaagtaatctgtgtcattttcaggctgaggtgtgtaagtattcaccatgccatcccctttacccacttacacaatgccaggacaaccttgaagcaacaagagggaagactaattgctgggtgcagcctcaatccctgagtcaccatatggacgagaggagcacagctgcatcagattgtgtcatgagcaagtcactagaatttgggatttatttgttattacagcatggtccagagtatcttgacaaatacattgctgttgtactggctccctgggtaagtccattatctcttctgttccaaatttggactcactcattgattcacaggctataagagttaatgggaccatctgagcagacaatgcaggcaggagcaggaggagctagtgcagacatttctggtgcttggctccaaggagggagaggaattaccagagagccttggggtagcagtatatgttattttttaaaacaaaatgacagtcactagtgtgcgaatatgttgttttagtatatagagatagaaaaccaacaaaaaacatggactacgatttcccggataacccctgctttcatttaaaaaataacagtaatatgtggtagaaccttcaaataaaatagatatacaaaaggaaaataagattttctctcctcattcctccagtgcctctgctcaaaactggatactttaaacagtgtgtgaaccgttccttgcattttctttggggaaaaagaatgtgtattctttttttttttttttttttccttcctgctctgtagcccagactggagtgcagtgttgcgatctcggctcactgcaagctccgccttccggattcacaccattctcctgcctcagcctcacgagtagctgggactacaggcacccgccaccacgcccagctaattttttgtgttttttctcgtagagacgggttttcaccgtgttag[133 bp omitted]tttatttaagattctgttctacattttgctttttgtcacttaataagacagcatcaaggtcttcctgcatcagcacccacgggtctttctcatactacttaatgcctttagagtagtctaccatatggtagcactatcatttatttaatatgacccctactgagggactctttgcttccaatattgtttgttcgtttatttttctactataaccagtgctgtagtgactataatgaatattcctgtacctatatttacagagcaggttgctagcagtgggattcttgggttgaatgggatgcatttgataaatattgccaaattgccttccccaaaattgcaccattttgcctttctaccaacagtacaggtgaatgctgtacatcctcagctgcaccgggttttaattttttccagttttgtagttgaaaaatggcatattattcttttcagcgtgagttctttaaggatgggtgtccttattattatccactaaaaatctgtttcttgagcaaactattttcattaacaggctatgaaataaatgaaacagaaaacaatgcagtgttcagagggcgtcatcaccttcagacggagctgtaccccgtcagactacccattggtgttctcaggattcctgaacttctgccccaaatcccttaactgattgcttacctggtgggttgggctgtaccaaggtcacctttttcttcttccttagactgagccaaccctgcacagccagatctgtgagttccttgtcaacaaagcaattcaaatacaggtcaagaaaatgcttgatggagatggtaccaaaatacatttctgcatcgccaaggggctagatggtatcatgtcttgagtttatttattttttgaaaacttatctgctatattttttctgattaaaaaaatacctttgatgtgaaatcaaaaaatacagaaaaatacaaataagaaagcacaaattgtttgcagtcctgccatccagtgtcacacactggtgtataggtttcttgtccttttaaacacacacccacatgcacatacatacatttaccaaaatcattagatattcttccagagggagtataacagagtggttaatagtatggactcttgaatcagatagcttgggtttatatctcaactctgccactttccagctgtgggactatgggcaagtcacttttattctcaagacctcaattttgtcatccttaaagtgcgcgtaataatagcatccacttcataggcttgctgtgtctgtcaatgcattaattacaagtcaaactggcaaatgggaagagccatataggttcttacttttttattattaaagatttcttcctcttgtatggatgtaccattattcagacccacttctgttgaacatttgatatttttccaactttttccatcacaaataacactgcaacagtcaatcttgtatataaaacttttctaactatggaatggccatttctatggaaagagaatctgagaatatggctaatttcaaagatttcaatgtgcattgccaatttttccataaaaattgtgataacttgtataggcagtacttaaaagtacctgttatttccttgttctttcaccaaaagtgggtgttattattttaaaaaatctattaagtcccctgtgccccacccaaaaacatatgattcaatagacctttttaagaaagaaaataacttaaaggaaaaaaataactggaaaattatggacattgagttgaagctaaaaccaagatatttatgtgatagaccttcaaaaatgaagacttctaaggttaacttgaaggactcccactgctaagaggctaaggtcttggttctaatatcatgaagaacataaaacaccctcaatttctttttttagttttaattttaacttctggggtttagatttgttacataggtaagcgtgtgccatggtggtttgctgcacctatcaacccatcacctagatagtccatgaaaacctttagtttttagatttttcggggattatggagaatacctttaaaataaaaacaatgacactaaactgtaaacagctgatcctggtacattaataactcttgaacttcactactctctgggggcataaccttggccaagccacatcccccatcctcttatgtgcaggattctagtgaaggaaggaggcggggagtctcagactgggctctcacggatcccttctggctgtaacatttcaccagcctgtactacctgagtttacaaaagagattagcagtgtacactgcaacccattttaaatcatggcctttgaccagtacatgtaattggagacactcttcaaagtgacaaaatgcattagcaggtcttggctctgctggggtctctgttacgaccagctgtcagcagcaactgcagcagcacttgcttcagcaggaaagtctatactgtgtggaaccaccccagtttttcatctatgccctttcttctctgggtccaagaaatcaagtcttctccttcttcttccaaatgagaaagtatttgggggtgggtgggggggtgggatgcaggtaccagccatgttcaagacagagcacctgacacagagaacaggagtagaggctgattctaaaagctcctgatgagcagcatctcccagtgtatacgatatatgcattcgtgaagccatagtttaatgtggcatagcttggtgtttccaaatgtgaatcttggagccaaacctctttaatgtgaattctgattctgaacttactactgtgatttgagcaagtcacttaaaccctctgtgcctcagtttcttgtagacaaatccatatttaacttgaataacctagttgactgattctcattctcttcatctcactgtagtttcagttaataactggacatgctggatattgcctgttaatacccagtatcatctcgcttttctaaaagagatctccgaaactcaggggctagaagcctggaaactgcatttcccagactcccttgccagcagagattctgccaaggagaggctctttgtttgagatttctgagatagaagagcagaagaaaaataccattctttagcagcagttgtgtgggcacaagtgtggccttcaacagatagtggatatggtttttgccagggcttttggacaccctcctatagacattgaaatatgtactagctttcttgtgatttccacatttccacattttgtgaaaaacaacgatgcctctctgacctctttcctcggccctttcaagggttgtgtaaacctctgttgccctatattaaatacattcctgtttaaaacattaaagaggcttttgtttcctaacctaacatttgtgaatacatcatatattctctaagtagtaagtagaaagcaccctaggcttagaatttaaattcctgggtttacagcaatcccattattgggtagatgcccaaagaaatattaattgttctaccataaagacacatagacacatatgttcattgcagcactattcacatagcaaagacatggaatcaacctaaatgcccatcagtgaaaaaatgtggtacatatatactgtggaatactacacagccataaaaaggaacaagaatatgtcctttgcagcaacatggatgaagctggaggccattatcctaagcgaactaacacagaaacagaaaaccaaataccacgtgttctcacttgtaagtgggggctaaacactgagaacacatggacacaaagaaaggaacaacaaacaccagggactactggagggtggagggagggaggaggggagaataaaaaaactacctattgggtattatgcttactacctggatgacaaaataatctgtacaccagacccctgtgacaacacgatgtacctgtgtaacagacctgcacatgtaccccggacctaaaataaaagttaaattatgcttctttataattagcttagatgtttttatatgaaataaatggtacttgcataatttttaaaaaacacaaaatagataagttcctgggtttcaattccacctttgctgctgaaaatccatgtgaccctgggaaagccatttagttttttcatcttccaaagaggaataattatatcaataattacgtgtttataaaaaatatttgtcccgattgcttcacaagattaattgcaaaggctaaaggggattatggatgcaaaagtatgtgctaaactgtccacatttttacgtgaaaagggagttactattttgtcatctttccagagtttctttttgagaaaatgaatgctcatgctgcacattagagagtctagtagactccttctcagaccaatagttgattgtgcagaaacctggggatggataacctagttatggacaacctagttatccatccccaggaattcaagccactgtcgaatccatattctgcttgtatgacaatggactgtgattcatactagttattcagttctccttggtttttgttgttgttgtttgtttgtttttttgagacagagtcttgctgtgttgcctaggctggcctcaaactcctgggctcaaactatcctcctgcctcagcctcccaagtagctgagactataatcatgagccaccacacgtggctcaatgctccttatttttaaccaactctgaagcctccttgatgaagccaagtgtatacctcagctgctcattctggaatggtctgttgaattagtagagaatatgtccaaagccaaaaacaaagtacaaagccaatgggaaagaaatcaataattacatgtttataatttaagatctgttttgtttgacacagtgccattgtggtaccagccctgaacaatgtttgcattctttctcctcctcatccatgtatctgaatgctgccacttacgctgtggacattctgagccttggttccctcatctttcatgggtcacgttggctctgtaattaagtccaaactccttagcctggcataactgtcctctcatgatctggcccttgctgctgtctcttcatatttgtcttttcctactttatgagctcaccctcaccaatgcccaaatattttattaataagcctcatctgtgctgagttacttgcagttcctcaagtacaccaggctctctcatgagcctggccattatacatgctgttcccatggcacaaatattctccttttattttctgttttggaaatccctaatcattcttcaaattccgggcccaaaatatctcctgtgtgaatttttcctggaaccttccttctccttctcctgtgatctcattacactgtgtaactgaaataatgtatgatagaccataaggcatagaaaacagcactgaagatcaaaagaaaaaagtattagaacaaaatatgtagggtaggaggtttgctatacacaggtacttgaatcaaagtacggatgagtcaaacttgtctgtaaatataactgttttttagattcagtttcaataataatttaaataataatgggtgctttggctttaatcataatttccatatactttttatttgtactcaataataatttcaacaccaattcaatttcaacatatgaagagcttcttctgttaagctcctaaaaatgatgtaccagaaaaattatactcaataataaattacttctttaattaaaaaacacaaggttttaaggggaaaaaaggtgcaagtgcaacatctgaggtagcggctgctttgattgtaatagaaaaggattcaagggtaaggttggagagagagcacgaattcacagaatcatttataggcaagtgattgcagtaagaaatgaaagcaagcagtaacaaaaggccacagattccatcaatgtgcttacatttataaaaacaagagcttgaaaatagagtcaatcattaggatgctttgtaatgagaagggaggtgaccataacatctcttgccgcacagagcgtctctgattgtgtcacagcaagtcctcaaaacagctgctaaacttacagcagagctacgttcttctgtttaaaaagacaagagttccacatttgatgaccttttctgtgatgacaagttgctatcaggagtatgcaacctagcagatattatttgaaaaaaaaaaatctacatttaatctgttctttcaaggtagaggtgacattttaacaacgcatgagagagcaattgcgtctcaaaagaaagccgtgcaatgcagacagcatttggaaaaatggatgtttggaaatattgcgattgttatgtgactttattgctgtaaattatgtgtctctcttataaaagttttcatatgtgtacactccaaaaacatgaaaataatattcttctgatcctctttaaaatcccctaaaaggaaagtacctgtcgaattttgaacctgtttgttaaaaaatgtaaaagtgcagtatctttaattatttatcagaaaaactaaacaactgatgggctgttggaaaatatctgagtagaatgggatccaagcagaggaaaatgaaaaaaaaaaaaaaaaaaaaacacgtcctgcattttccatactacacctctattaatacggccaaaaagcttaccagtaatgcagccactatacacagttgatggcaaagttcctctaggtctctactccaccaaatttcagcaattcgtttttaaatttaggcaactcgtgacggactcctctgtataatgtaaaaatctcctgtcaataaagtccatttgtctgtatttaccatagggatttgggattgctttgtgcagtgttttctgaagctggtgaagtttccagtggaatctagtgacagcctgtgagaagtgaaatcatccttattttagagcttccccataaaattagcaactttgccatttttctgtagagagattgatttttatgtttctcaaaaacaatttagaaaacatttttaaaactatcgtttcatctgtagccttcttgtttcttatgaggtagaaaagatgattcttgatgaaagacatctatttgaatggagtcagactgtaatgctcagtaaaactaggggtaatgtgccttgaatttcttcttcaattaatttttaccttttatccatcttgtgaatcaattctatgcccattccagggcctcccagaccatgcacccccagcccccacagcctctccagcctctctgagcccgcccccttccaccatcactcatggacccgctggccgtccttcttttcttgcaccgcatacttatcctgtctcagggtcttatccttgctgtttcctcctccaggaatgctcttcccccaggtattcaagaggctagctgcttctcattgagagctgaactaaagtgccaccttttcagggccctttctcagctcctttccctaatgcagcaccaccccagccattcccatcacatcgtcttgttctacagtctcttggtcttagcctgtgcatgtgtttgttaactagttatgagagtaatataactataacgtaagtaatataatagaatgtaagtgctgtaagagtccagaccttgtctatttaatttaccactgtaccctgaatgcccacaataccatttggcatgtagtagccagtcagtaaatgtttattagatgcataaagaaacaatactgcaaatgtctcaggcagatagatccctcttcttcaaatagaacggggcgatgtaaggagtcgcagatgtgtaaggtccattttaggagaattggggaagtagtgctcgttagatggccagtgtacgctggttcatcctgataggtgtatcatcctccccacaacccatcagtgtaggtgagattgactcctttgaccagacaaggaagcgtaagcttagcaagttaacacaggtagcactggagccacagagctgacacctggccaggctgtgccttggggtcagtgtgtcggaatcaggacctgtcttctttctcctgcggttttctgaacagcacaaagatgcagttcctgggggcctctgtcaccaaaatgctagggttcaaacgtcttctaattatcctccactgatcttctactaattagatcttctactaaatttcttctaaatcttgtagatttattttctaaatcttccactaaaatcttctatttttctgtgactttaaacaaggtattgaatctgttaagttgggatgataatagtacctaccttgcggttattgtgactagtaaatgagaggatacacattaagcacctagaacagaacctgaactgctaggtgtctcaataaatgttgactgttggcactatgatcactatcatcattgccataagtcttattgtttctgaagcatttctctccctttcttcctttaataaatactcttcaggatcctactaggtgcctggcactgtgcaaggtgtctgagataaaaggacaagcagaggacaattttaactgaaggtgatgtgtacaaagtgctacagaagcttaagagattgctgaaaagctttgtggagcagttgacatttgagttaagcctttaagtttggagtagaattcttcaagatggagaagccagggcaaaggaaagcataaagaaacttctgtcgggactaggctttaggattgagtcaagattttccatgggaaaaacaaactacagtttttttaaaaaaagacacacacacacacagacactcactgagagagaaagaatggcagattggaagctgagtgcaaaatatggctaaattctacctttcaatcatatattaagtctagtttcatggaggcaatattctttgagaggaaataacttgggttttgctgtcagacagtctggaggcaaaatggcaactaagctatgtgtctttagacaagtttatttacctttctcatatctaggtacattacttgtttaaagaaagatggaaggaaggtagatattctcatgttataggatagttctaagaattaaatggaataacctatataaaaatgtctaatcagggcctggcaaatagcgtatgttcaataaaatgtctgctttctttcttccaaaatacagctgcacacatactgaccatgctgtcaacctgaaccgaacattgccagactagtcattgtttacacatttaacaaaattaagagaacacaaccacttaactcagttatcagtttaaatgagaagcaggattttctttcccaaaaatgagagcccagagaagttggggcctctggcactggtagttcattggtcgaattttttatttggacatttatttagtgcctgccaagcaacagagacttgggcgattgcttgcttttattattcattgatcccttacaacaagcctgagggtgggaagtctcccattttacagatgaaggccacctaagcttagagaagttaagaaacccacccagggggtttctggcaagtgatgactccagggctggctccaagagttctgtaattccaactctatctgctcatccaggatacctcttgtgatatcgtttttttttgtttgtttgtttgtttgtttgtttgtttgtttttgagatggagtctctctctgtcaccaggttggagtgcagtgacgcaatctcggctcactgcaacctccacctccgggttcaagtgattctcctgactcagcctc[137 bp omitted]gcctcccaaagtgctgagattacaggtgtgggacatcctgcctggcctcttgtgatatcttatggtggtaaagtaataggacccgaacagctatgaagagcagagctagggcaacctggaaatgtccatgtttcttattttttccataacagaacactagtcatttttgtccatttctctatctgcctttgtctctcagtgcttctttttcattctgtttgtagtcatgtgcataacattccctaactacattttttcttctttttctctactccaggtagagaaactgaggctcacaatcctagagagatagtccaagctgtatgtagtatttgacttggctggaatccaaggctccagccccccaccttcccatctgtcaccctcctctgccttctctctctggtgtcagacgcagaccttctgcttccttgcctgccagtctgacgcattcttcaggcccagaaccatttagaaataattattttaaaaacaaataaactcttctttctgtgatctttactttctgttcatccacaccaagctgtggctatttttactcaccctagctcctggcaggtctttttggaaagtcaccatgacattttgtgctgcttggcctggcattcatctagaatattttttcgaaaacatcctgctctggagaaatgtcagtgtttatggtgcatccagagggatatatcagcagaagaaaagatccacttaagtaagtcctagcttgacaaggagtgggtttggaggcagacacacccagaagtagcaaagcacagtgaggcatgctggaaagagatggtggtgaagatccatgtctgtcgggaggtcacctggtgaaggtttgaagaatctggaaaaaggatggatacacagactgaacagtagttgggtgctcaagcgaaagcagggaggccgtcccaattagtgatgtccagctggtactgcacttggacaagtcacgttttctccttttctctattggaggcctcctcttgtatcaggtatgggtaaggattctaggacaaacatacacagtatccttcttactgatgctggagaaggagcgttggaagaagagtctcaggttctagtgctggctttgctgccaagtagttgtttgatcagcagcaattcacactatctcttttggcttaattcacattatctcttttgaataaagtggggcactggatggtcacttctaggccttaagttctttgagtctaagacaaatgaagatggttgcttatcatagggctaagcatttggggtctaacaagtcaaagggaggtcattttcaccaatccaagcatccatcatacatctgttcaccttcactaagaacattctatatgtcaagaactaagctagcactatggaattgatttaactaaatacctatcttcaaagaatacattgtgaaaaggcacgatagccagcatgactctcagtgagcactgcctctggctagtgacacccttgtgtggatcccttcttccttgtaccaggatcagtcttgttgatcaatagaatacaacagaaaaggtggtatgccattctgaggttttgttatcaaagacaatgtggcctctctgtctatctatctatctatctatctatctatctatctatctatctatcatctattatctatctattatctgtcatctatctatctatctatctatctgtctatctatctatcatgtatctttatctctctttcatctcttgcagtagaggaagtcagcttcatgttgtaaagatgttcaggcagcctataaagaggactacattgaaagctggtctccatctaacaaccagtgaagaactaaggccttccaacaactacaggagtgagcttagataagtatccttccccacttgagccttcaaatgactgcagccctaaccaacagcctaactgtaacttcctgaaagaccctgagccagaatcacccacctaagcagctcccatgaaaactgtgagctgataagttattgttttaagcttccacatcttagattaatttgcaacacagaaattgataactaatacagaagagagattaaaacatggacctatagagttgtcacacaaactttttgaatatccctaaacatcaaagacataaataaaaggtctggtgtccactttcagggaatacacaattgaaataaaaagtgttataaagaaataaaattgacaaatctgccatgtgagttttaaggagaacaagctcatggccagctggagagagagtgggaaatctacactgcttagcttgcagacgcttcatgagtatctttgaactggattctgaaagatgaaagagatttggaggtgcaggtggaaaggtattctgaatgtcaaggtccttgtaagccaaccaaccaacctcctcttagatcaggcattggtaggaattccagggcaggcatatacagggcctttcatgttggtggtggaaaaggagaattggaagaagattctgaggttctagtcctggctttgctgccaagtgattttttgatcattagcaactcacattatctcttttggcttctgtttttgcagctgtagaatgcagtggggcactggatggtcacttctaggccttaagttctttgttaacttaaggagctttgaatgaataaaattggatgtattcttaagaatggctggtaatttaatgtggttggtaagtatggaaaaaaaaggactagaacgtcgtgcaaagatgtgagtcctttttcctttaagccatggttcttaagctttaattattcatttaccacgtatgttattttttaatgcaagtataccatatatcataatttggttaattattaaatttagattcactagcttttttaaacattagttttgcctttgaggacaatattcataaaactatgaatctgctaggctatttacattttttctaataaacataaaagtgaacagtcactatttaacgaaatgcgctcttctgtgtaccacctgaaatccttcaatagtccagcagtggtacatcatgctttgggaaacaccattgataacggtgtcaggggaggggatgccctaatcgaagctgtgtttgtgtggagtcagctggaagtcaccctagaggctctcctcttctttagcactcctgacatccaatcaattaccaagtccagtagatcctgtctcctaagtaactctttatgccccttgctctcactccctcctcaacttcctgggcttaagttctcatcatttgcaacatgcaccatttcagcggcttcctgatttccagcactcaaaccttgcccttcctctgccctatgaacacaattctgaccatgtgacttctttgctcaaaatcctttcccctcaccttcagaataaaaacacacactccttagctttgtgcactgggcccttcagacttgagactgtgtacacctgtccagtctcacttctggccctcatccaccccgcatcaacacatgcacaggcacacttcagcctccaagaaccctgaaggatttgcacttccctgagcaagactgttctcacacatgtaaccttgtgtctttgaaggaaaaatgctgtcatcctggaatgccctcccttcctagtctgccggaacaagcctcctcatccttaggggttcagccattccagattccagatttctctctagagacacaggcatgtcttccctggagcaaccatttcactgggtacaaatctctatcctaccactctgtgttataaatgcctcttgatatcccaaatccagtgctaaagtgtgaagacagagtttgggtgctttatttattcctttatctttgatgccctgcaccctggtgccacccaataaatgcttctcaaataaatatgtggcctgcaggcgtacagaggcaagtctatggtttggctagaaggggaactaaattccagctccctcctgctgctgctcctgccactgatgaaaagtgtcttcccaacaggaagaatgaatgagccttggggcggtggtagcaggtgtgctgaactctggctaggtctcctcaacccctgaaggtgaggccctgctcaaagcttcctgattcctgttaagttcaatgttttctgacagacacaagccaattagctgtctgctgctggcggctggtttattcaacatggtttgctgttttgatttgaaaacctaatatttttcagggatttgatttggttccactggggagcagagataagctgttcagcctcagccgctgagctggctctaatggccctcattcactgcatacccagtatccagtgagttctcaggctgtctccagcttggatgtaagaagaggcctcctccgggcatctgtagtcccagctactcgggaggctgaggcaggagaatggcgtgaacctgggaggcggagcttgcagtgagctgagattgtgccactgcactccagcctgggggacagagcgagactctgtctcaaaaaaataaaaaaagaagaggcctcctcctgtgctgtgtgtgggcctacacaggtggctaggacaaccctgattggacctcaaagaagccaaaggatgccaatgtcctcccattagatcagggtggtcccgatgcctgggagtctgcccagccccttctatggggacctagtctgattcagcttctgtttcttccaagttctttctgatttgctgttggaaaatcagaaagtaattgattttctgatatctacctgtctggtctttttttttttttgttgagacaggttctcactctgtcacccaagctggagtacagtggtgtgaccatagctcattgcaacctcgacctccttggctcaagtgatcctcccttctcagcctcctgagtagctaggactacaggtgcatgccaccatgcctggctagtttttaaatttttttttttgcagagatgaagtctcactatgttatccaggttggtcttgaactcttggcctcagtgattctcctaccttgacctcccaaggtatgagggttacaggtgtgagccgcctcgccaaccctatctggctttttaaaagcagggaactctgttccctttgtgtttgtatccctggctgataataataatttgtcagtgtttagcctgtgtccatgcctggtaagtgttaagcactgtcaacactcttctgatacttaatccccataacagccctctgaggttgatacaattattacctccatctaatagaaggaaaaacttgagtcaaaagagattaaggaatttatcaatgccaatgttcaccttctagcaagagaccagtctgggtttgaattccactttgcctgataccaaatcccatgctcttagccctgcactgtgcctggcagtatctgttgcacgtgggagccctcagcacagtgttgggaatacagcatggatgcggccgttctccccatccaaagtcctctcagctttgggtgagggctgacctccgaggagtcacagctgccttcatccagaccctctggattaggccctgtgttgccaacatctgcctgaactacacttgtatctgctattcctgtttgacccagtacataagccctcctggtccccctggctcccatcccagaaaccagcttctgtagccagagaatgctcaccagccctccccgtggcttcttccctgctctctgccagcttttcttccacttttcagtttggttaagatctgaagtctcccatgatccactattaaggatgaatgattaggcttcaaattagaaggcacttaggaattaattgtctgaaagggctgacatttcactccagttgggaagtttttaatcaattcccagatcaatgcacagctctcctaattggaagaatctgacggaaatcagagggctactcagtttttataaagtatctataaaaatagataggttagggagctagtgttgaccaagtgacgtatgttggttgcgttaatacaagtattgtctgtacagtgagggaggtgattggctcttgatttggtgagtcccaggttacatggaggaaggtagacaatatttccctgggagagctgggaaggttaaaggatgctagagggaggataccatagccatggccctatagtgctatctctttgaactgaaaaaaactggaatcagtgccttacttgaaaagtgatagaggtgctgctcagcagccctgggcaaacttccagggtagcaaacccagttctgccagaagctctggccttcagtaatatcccagggagagaagcggtgaccctgtaaggctgaagagctaaggatgattatgccaatggaaatccctaaagagattttatgtttctcagctgcagtaccatgaggctcagcaagacgaggaaggggcttgttcaagacttgggcatccctcttgatacttattcattgaaggtcaaatgcaggttacatgtgactcaggtgcggttgccctgttaagccctttatgggaccaggtctctctaggcccaccagcggccatctctctacttttcacacagttgccccagggatgtttctgcaacttgcatctgatcacttttcttccctaccctcaatccctctgtggctcccaatcatctgtaagaactttgggatctcattcctgcagtatcttcagcttcttcatctatcagttccttccttccccatctcacataagttggtcgcatgctgacagttcctgaaaaagccagactatgccgcttctgtaggtcctggttcacatggttccttttctctgagtgcccctctgctcctgtctgtgcagtgaccacctactcagctttcacgaaccagtctgcacatgccaactccataaagcctttcctgcccctttcctgccccctttccctgtcctccccggagaaaggaaaggaccttgtgtgtgccccgtggagatgtctgacttgtaccccctagtgcactgatgtcccctttaggaccatgccacttagctctctatgacaagcatgctatgaaacactgcagcacagtgctcaaggtcaagggttccaaatcctagctctgacactccctgctgtgtggccttaacaatctacttaaccttctgagcctgttttctcctctgtaatatggaaaagataatagtacttcccttactgggttattgaaagaatcaaatgtgaaaattcaggcagtgttcagtcacactgcctggtctatggtgtatgctcagtaagcattagttattattgtttgtattcttgtcatcatcatcataactagcatcatcatttgttgagttgagatctggtctggcattgagtaggtgctatacacaaaagtataaaattaaggactgacatgcaaagtcctatctcaccaaaagggtgagaccattctttaaattcttatctgcaaattaatatttgttgagtgactaaatggaaaagtgtggataaaatgtgactctcagattggagtaaagttggagaataaacctgggtaaggagcaagtggaaggttgtccaatttctgtggatggggcccaagaagacactgccacatggtggtgggagggagtcagaggccctgaagccaggcaacgtacaggtcaagcaatgccagccccttgggctaagggaagcaattattggagagtcagaaatctgtactttgagaacctgcctttatgtggctggtgttttctgtagttatttcgtttgtgctccccctcagtcttaagcgtggcatgctgcttttagtgatttttttttttttttttggagggagagtttctttttgatgccagcccgtctcagctatactaaggagaaacagagaaagtgactgaactgaaatgtaaatggagggactgcagtctcatgatgacattatgggctttggagagagacctacccatgtttgatgtctgctggttctgtgacgtttttgtatctcagtttcctcatcagtaaaatggggataagaatagtatccactgcaaaatgttgccgggaagatggaatgcgattgtgcccacagggtgcttagcattatgcctggcacattgacagagaggacaaagacagaagttaaaggcattgggggtggtatagcatccataggtggaaggaaatgaaggggaagggggagtcaaagtctgagagtcccaaaaggcaagtgaactctggagcacctgaaaatctccttccagggtggaatgtgttcccctgggagggccctttgttatattcaaataaagaaggttattgtctgagggggacttgatcaccattttcaaatatttgataagaaagataagagggtatggtgtaggacagatgacctttaggtctcttccaagtctgagattctctgattcaagaatggggaagggcccaaaagtggttgtattattggttcaaagtagggctgactacacaggtcttgcagaaaaggaggcagcatggcagaagttataagtgagggcttgagggacagaactgggttcaattcctggttctgccacttattagctgtgtgacctgggaaaatcaactaacctctctgagtctcagttttctcatctggaagatgataatatttaccacagagggtttgtgatgatcaaatgatataatgcacggaaatcccttggctagtatgtagaacctagtagtgatagattcattgcatttaagaatgtctaatgttagtgaaataatttacctgcaataataatatgatacatcaaaacaacataataataacgcttaagattgttgttattgataaagtaacacacaattctctgtcacggttcagattaaacgtggagctgtgggatatggaagccctgcatgccccagcactcaggactgcccagtgctgggacagtgtccctagtcacatgttttgtaggccagtcagaagatcgtactccacccctacccccaacccttgaccatgagccccgagaacctggaagctgcttttcccagtaaactatggagtgtttggtgcactctttgatttttatttatttatttacttattggtagagatgggggtcttgccatgtcacccatgctgatcccaaactcctggcctcaagtcctcctgcctcaggctcccaaagtgcaaagattacagatgtgaaccagtgtacctggcctggtccaccctttgaaactccctctgcaccttttctgactcttcttgaccaagcttgtctctaaccttacaacaacaatgccagcaataataataacagctgctatttatgttgcatttactttctacttgtagatgacattgtgccaagagttctctgtaagtgctctaatttaatcttcaaatatagttggggttccaggaggtttgataacttgagcagaaagccctggattacagcctagttgaggaagaagacccagaagctctcttacttttgctccctgctggcttctcctgtgtgggttccagcacaaagcctcctcccctagaaacatcaggctgagtgaaggcaacatgattttgcctcagtgctgcctttcttctccaaggactggtgagggtcgggtctccagggagtcatctgagagagtgttaccctgattctcactggagtgcatcaacccaatgcccatgaagcccaggggcttgccacagcgctcctgacctgtgcgagggtccaaaaaggctcttgtgtgagccattccccacctgtggggtgcaacaaggaccaggacacctgcttctctgggcagccctgacatctggacacaatgcagagggcagatcacgagtggactctgggacatagaaaggtgagatagcaaggaaggaccggttagaaaataaacatcacagcattgacccaatcccagtccctgccacaagcttgggtgccccaaacttggccacagggagcctgtttctgctgggtcgaggggttgctggagttgacatgcccagggcctctcagttcatgtgctcaccccttgcatttcatgcagcctacgcctgccatgtctgccaattagcataaggcagtatgtccggcaaaaaacaggtgggtgtttccttctccctatgcacagggattgtgcccagagcacatacccatatctcattctctgtagcaacagccacacccatgccccaaccatttaatagcttctcagcctgtcctattctaaggcaggaaagggtcggtggcagttccagccttatcctcagggtctgacacaatcgggcttttacgaaaggcatgttttactgccacctgggtctagcctagtgaccctgagaccctgcctcttcatgactcctaagcccatcttctgtgcaaagccccagagctaggggcttccagaggcatttcctgccttattctttgtgccttaatctgtgtcccaggatcctgcccttgccctcaggttctctgggctcctactagtattccccaaacctggtgggtgctgctagaccacagcttgaactcccaaacacctgcaacaggcccccaagagttggacttcccattcacgtggattttagagctaagcctacttctggatttcccattgctgggccctatatgactgtcacactctctagttccctgaatatactgcccacattctgacagtgccatagggctgtcatctatgtctgggctccagatttcaggataattgcttctgtctgatagatcaacctccccccttcaggtctaactagtttctgatcccatcctctcctagcctgccctgtccagctgcagtgaacacagttgtttctggccctatcccaaggtttaccagacccttcacctaagttagtaacaataattactagcttgttcattcaaaaaagcattaactactttcctgccacatgcta[132 bp omitted]gctccgcctcccgggttcacgccattctcctgcctcagcctcctgagtagctgggactacaggcgcccaacaccacacccggctaattgttttctttctttctttctttctttcttttttttttttttttgtatttttagtagtgacggggtttcgccctattagccaggatggtctcaatctcctgacctcgtgatccacctgcctcagcctcctgaagtgctgggattacaggcgtgagccactgcgcccggacgagagaacttttatcatccctgtgcgattggagctttggtttcgtggaggagagagacagtcaataaactggcaaacaaagaaatagagaatatactttggcaaatagtgattatcttgggcagaggattatggggaatttcacacattccaagtcacacatttctgtaatattagaaattttacaagcatacactgagcagggaaagaagtaaatattataaacaaacaaaagaatatttgtcatccaagtctagggcttcatctccaactcactgtttctaaatcaaacgagtacatggtgaggccatttatggagatggagaagattataatgaaattaggttgaactagatacaattgctgtatttgtgggtcaataatgataataataacgtagctaagattcagtgagcacttgctacgtctcagatactatgctaattgctgtgaacatattgtttcatttaacactacagtcattattatcctcttttccagaaacagaagtttaggttaggcaaattactcgactattatctcacggctgtgaggcatagtagctgggactctaaccaggtcattgtactcttaggttggctggtctatttcccttagaactactacctgcattaggggacataagcacatcatagcaacaccagtgaaagcccaaagtgggagatagcatttaatcttctgctctgcaagtgaattgctggagaatgtatttttaaacccctatgggaatgctgagaatgcttaagaaagacagttaaataaacagagcgatgaggaggcaggtgaatttatttttagcgtctctctgtatagagaaggcaccagaggcagagaacaagaaattgccctgcatattaatggggaagctgagaactgacaacagaggaactggaagcttatgattctccagccctgccttcctggtaggtccccattggaacaaaacctcatcgccatgatctcttactgaaagagtcacataagggtatgctaaggcacacacaaggatgctcactgcaactgcaaaacttagaaaaccatagaaatgttcatcatcaaaggactagataaacagaatggagcccatgcatacaaagtaatagtatgcaaccatttcaatgacggatacaattttatattaattgacatggactgatgcccatgaaatgttgtttagagaagcaagcaagttgcagaacaatattgcattattttgtttttgtaaaaattaacaatgatgtgtatatgtgtgaatatatgtggatatgttatgtgcatatatacatattaatacagattcaaaatgctagtatatgcaaataaaacatacagggaaaggtgtcaaaatattaacgggtcatggtagagtttcatgttttaagttgtgcatttctgaatgttataatatttataaggatatcctgagtttgaccattaaaatacaacaagataatcttatatattcttgcttctcctgtcctaatcagcatgacgtgccttagggggaagaaggcagccttcagtccctctcattatcctaccatgtgtcaggacatctggcctcaaacctcattattgggccaccttgttgtcctgtagagagctaacaggacccgccctggctggtttgagagctagtattcaggtggaaagcttgggaagatgcctggccctccttttatcatctccatacggctgccctgatttctttctaagagtccatatttatggggcacatgtctctgggctgctttccgcagctgagaagatattaactgaaattttctcaatcattcactctactcctttctaggaagcaaatagttctgaaagtctttatctggatatgcatacacacacagcactcagacacacaccaatatgagctcagacacttgcatggcaacacaccaagtgacaaagacaacctacaactactcaaactccatgcttacaaagctgcagacacatggcagtaacacacaagcatatgcatgcacacacacccacacacacacacacaccacacacctgtacaattctctccagctttgaaagagaaaaaaggggaggtgtactctagaccctccagcaggctgaccaaagaaacttctgaacatgcaacacttctttctccccttcctccttcttctcctccccttgttcctcttccctctcttctttctcttccactattgtccctatgcaagatgatttttttctaagctcccttagaaaaaaagctaagatttttttctaagctcagaggctaaatgatgcagctagaagcagaatctggaccaccaattaaaaactgcctgaggtagcaaggagcaggtttttccttgattgtttctccctacctgcctgtactgctgcctctcccaaagcagcaagctggccactgaagtgcccttttccaaagagcagctcggctcctagatctgcatctccagctcctgctccgattcctctggttactctgggcacctccaagctccccaccctaccttatgtccacatacaaaggatgggtttggagagggaggaaagaggaactagaaaggagatttttagcatcagaaaggaactcatactaaatacatttttgttggggatgaatgggaagattttttctcacgtctttgttcccaagttttgatgaaaatttgtgctgtaagggatctttctgcttcccactccagtggctataaacagccacacatatacaccttaaaacatcatcttgaacacaataaatatacacaatgctatctgtcaatttaaaagaaagaaagcaaataaggaaggaaggaagggcaaaccacatccttgtcaacattgtaattacctgactacctgactggtacttcctgcctgctgcacaaatgaaactagttcactgagcccgtggtattacagtaaagaaagagtttaattgaaaggaggtcagccaggtggaagaattgtagttatcactcaaataagtctccccagaggctgagaggttagggtttttcaaggatagtttggcggatgaggggctagggaacgggtgctgctgattggctggagatgcaatcaaggggtatggaaaatggttcttgtgtacagagtctgcctctgggtgggggccacaggactggttgagttatgagtcaaaagtctagataggctcagtcagttgccagaattcaaaagtctgaaaaacatctcaaaagacaaatcttaggttcttataataatgatgttatctacaggagtaattggagaagttacaagtcttgtggcttccagaacagtctgtctatcatttaactatacctatatattagcagaattcaggttcccctcataatcctaacctgtggtgtttcattagttttacaagggtgatttagttttgggaagggctagtctcatccttgctttaaagttaaattataagttaaattcctcccgtgattagcctggcctctgcccaggaatgagcaaggacagttagcctgtgaggatagaagcaagatggagttagctatgctagatttatctcactgtcataatctttgctaaggcagtttcaacatcaccaagaatgctctgatcgatgagtgttgtctgccgaggatgtaacgcggagtagaaccacatatgcacaccatttgcatgaatgcatgcctgcctagtttgtacacacacacacacacacaaacatttatttgtcatttattgagagtattatatcttggatacaatgttgggacctaggacctgtgctccaggagtcattgttgaacagagagatgggtatagcagctcctgccagtgccccacctcaagaaggctgcttaatgagagctgctgtgactctgcctgagaatttttttttcctggcagcccaagcacattttatccctgaacagaataagccaaaactaccagaggattagtatccctgggctgccctcaaccaaggatggatggtgagttagtgggcacttcccggcttccttgtccatcagttgcaaaaccttcaaggcctatttcctggagttctctggcaggactgcaccccagttgtcctgggtggtcatgggccagataacacaccctttactgaatttttcccttttctgcctccgttccccaaagcaaagaatgaagagaggttgtcaccggtgtctaatgagtgatataaaggtgaagaggagataccatgggagctcaccatggggagacccaaccagccaagcagaccaaggccaaactggtgatgggcaggtgcagaatgccagacgtgaggcttttccaaggagtcaatctgcttaagagacacagaatgaagcaatgtgtgtggaagcacttggtaaactggctagctttgtagcatgtggaaaatcattattgagaaatgtgaccagacaaagagatttcatcccctctcctgggtctctgcaatcaggcagtttatcttcttagccacagcttccctttctgggcccttttccagaacactccatggtccatgtgaactttttactctttttcttcgttccaaatcttccctgagaaaagtctcttatgtttatcttacacccactgtggtgacttcagtcaaaggttcccactctggggtccctgggagcctgcttcttagtgaccatgaaattctcaaagaggaactgccccgaggagctgcctccttgggagtggggcaggagctgttaatcctgtgacacaggaagtacactgcacccatgtttcttcccaaagggggacccattttcagcccaaacactaatcaggaagtgactcttctcaccaaaaggggtggcataaaaatcttccctttgccccatactaagggtgggcagaaagctcaggttaagaaaaaaaaaaaaaaaaagcggaacaaagccctccattgtttaacaaatagagccagcggccagtattcggcagaacttattggagggaataaaagcctccaaaaaacatcaatggataatgattattcttaaagtgccctttgagcaattgcattaggagagatggaaaatagtctgtaaatagtaacaagggtcctgatacaaggaagtgactgtaacagggacaaggattaccagtgtatgaatattcctgaactccctcacccctgggcttctaagggaggaggatttctgatcgctgtgtcggatcctggcctctttcttgaggataattcgggtaggggatgcaatggagagaaggctaaggaggttggaggggtttttatctacataataaagatctaagaaagaggaaaggctgaagtgaggagacagggagaggcgggaaagagagagaggagagagaaaagctgccatgggggctgagggagttttgggggtgcaagatatctagaaagagagtatttagaagagcaacaagggatgaggggatttgaaagagattttctttgaattaagaatgcacacccacctttgcatttcgccaaaagacaagtcacgaatcgaaacatgtttaatcattgtttgcttgccagacttcatttctttgcaaaaaaaccacaaagcacctcctgatccacctggattagacagccaatctcacagagagagcacggactgtgaacggcatagggtacacacaaggacatacagagtccagaagaagaactcaaactaagttggcacagagactctctcagcagctgcacttttaagagttcttattcagttcttactgaagagaaactgcaagggcctcacaggccctgttgagtagcgttcagggtttacagtagaaatgcgtgtcaatgttagttatttaggaacctgcgtgtagttcccattctgcggtgtggagtcagtcattctcaacagatgctttagttatctctagagtccctcgtaggtattgctgaggctgagccctgctgcccctggctggcctgcgagagtcaggtttcatcggctgagagcaggaatccccataagcacctctcagagaatgtgggactcaggaggcatgtttcatgggggctggctacgcaagacacttgcacttgagtccctaccttggaaaaagaaaaactctgtccctagtaaaggaatggcagcaacatagaccctatgggagaaggggtcttctttaggccacggagtaacttgctgtgatgctgaagttaggcctggttagggctgggctgcctatttctgctacagagaaggatgaacctgcctctgttcctctctccatggagacatctgttcccttgggtggcttcctggatccttcatagaatctcctttcctctagccccatttttcagcccagcttatagacagttctattccttgcccagcacgtggctatagacagggctgagagaggaaagctgaagagattgaaaatgcaaacaaaacaaaacagaagaacccaccttcacttctttactgaacatccgcacacagcacacgctcagcatatactataagctctgttctccttctgcagacatgtacacacccctgagtaataatgctgtctgtgtgttctcatgcatggtggtgcccaaaaggccataggaatttgacagttgaggaaactgaatccagggaagctcaaggactcactcagagccacacagcacccagaacttgaaccaacattccagactccttgtccactgctcttcctgttcagatcatgtatggacacatgcagtggtgcagagtgtgcctcactttatcatcccagaagcccctctttttgcagctgaatggaatcactccaaaacataggaagaccgaggataccccttgaagataccaaaacctcacctccttctggttgcactatggagctggacagtgagggttctctgtggcaggacagtttaaagtcaggcagggatgccattagcaccaattgcgtggtctgtacaaaagggactggaaagaaatagaataagtctcagtgccttcatctgcataatgggcatattaacaggctctatcacccagggctgtggaaaggattaagtgagatataaaaagatcatacatttctttttcttaattttcctattttttatttttagtttttaggtatacatagtaagtgtatatatttatagggagaagatcatacatttcctaggacaggactaatacattcagctgtggctattatcagagagcaccaagaccttaggtagggcaaccagactggctatggggcttgacataagccaggcccatggcccataaactatttcaggtaggaagtaagcaatactataactcgcactctagggggagcaaaaggacaccccccccccccccacacacaatggttatggctgcacacctggtctcaatacagtgaaacttgggacttgctgccaagctccaccaggcaaggggcagaggacactgagtctccccagactgagtcaggagcagctcaggagctgacactggcctgagtttgcagcaaagggcccttgagtaccaggctaggcagctctggagaaggcggaagtggagaaagttccaaagtcaattccactctgacacactgtttgtgatgttccacagtcagcacaatgcctgccccttgtaagggttgcaaaaatacttgttgaatgaatgaatcaatcagtgatacagaccaaggtcaaatcagaaccccaaaccctaaagactttatactctcactgtccgtccatcaaccttctatcctgtcagaagtcaggatatcccttgcaagaccctttgctgtcctttcagttatcttttgaatagaggctctgagccttgcaagtattgcctgggaaatatcaactccctcaattaattatatggtgctatctgaccaggaccttattttggtataatgtgaacctgagacaggagcacctcctagttgcatctttgaaatgccaagcaccttcattcatgcttagccctggattgtggggagacctgcaaaccttgtcagagcatggcttcccaagggccaggtcacagggcactttgcagccagaactcagccagtactgcctgtggctaagcacactaatttgttgaccagggtgggtgcccttggcagctccaaccaccacgtagatactccagtaagtttttctacttcaaagaatggaggttttcaaactctgttggccatgacccacagtaggaaatacatattgcagtgacccagcgcatttatgcatacgatgtattttatcattctcacatgctcatttccccccccccacatttgaacatctctgaaatttggatatgttttacaaattatgacatcttgccattaattggcagcatttttttctttctgggtgatacataaaattttgcatcttccaataaatgatgactgtgattcagtgaaatatggcatatgtgtaacttaaaaatactttttataaaaactatctttgctgcatggtgctctatgacattttctatgtgttattttacttcttctcctttcaatgctgttcactgctacccatttagtcaacttgcaccaccctttagagggtcttcaattgttattttcaacatatagtcacaggaacagaggatggtgttagtgaactctgtgactaaagagttttccataaatgggtggacctgagatttacaagcattaagttattgggccaggaggtggaatagatcatgattaggagagtcgaaaagaaagatgacaaatcactttaagtcagacaaacctctttctatactagctcccttacttactaatcatataactgtggatacatttataaaaattattagtgtcttagttttctcacctgtaaaacactgaacagagctcctgtcattcagagctgttgtcaacaagagagttagagtgtaaagcattgacttggggcctgcatgtagtaggcactcaataaatggtggcaatcatggcattggtgataatgacgctcagtaattagtaggtgttattattaaaagttgcaaaaacggctagtacccaacatgactttagctggtataaagatcttataattatttttaaagtcgcaaactattgtattcatttgattgtatagtttcttgccatcacaacaaacactcctattcatgtctaattcaatacttggtgagtccaagaaagcatttgggtccctactgatgggagcaccatggccaagtcaccctcttggtcaggttctcttgcttctcgttgtgtgtcttatctcactgtaggctttcaaactatgggctcgggcaagcctttccagtgatcacattaatcttatattttatgtgttaacgtgtgcctccaataacttgctttccttgctcaccatggtgatgcgtttttcctgctttgtgtcctccctcattgattatgatgggctgttgactatttgaacctggtacttctacttgatcagctctacacagtttcactccttttcaatttcagtttctcttttatcagtgttctctgtcaatccttataggcctagatgttcattgtggtttcatcatctatttgatctctcctgtgatgtttcattagcatttcttcaatagtttctcaggggtatttgccatgattcagccattgtacacttcttaaaactttcaagcctttgaataactgaaggaatgtctcacagaaacataacctttcttgattacatgaattaaccctcaaaaatgcatccgattatcagaaataccttaatgcattgtattgggttcaaaatggataaggtatgtttagtattacgtgatgaataaattctaagcttaatttaaaaaatgttaagtaaatgtctagagatgcatacaattctaataaatagatattttctacctgtctcctgtcattgtcaacatttgtaaactaacaggcatggttttcttgtgaataccagatatttgtgtgttcattggcttgattgaatatgtgaaacattcctagacttctttagctcagtatgtaggaaggtagatgggtagataagaaaggaggaagaacagtaggaagataaatatgtcggttgatagataggtaataaggataattgccatcattattattttgcttggtttttcatgattagccacgtgaaacattattatagtttattgcgcgtgttcctggtctcttagtttgcaaagagcattcacctcatgatctcctaactactcagtaatagagacaaagtaaatattcccatttgacagaggaggacatagaagtccagagaggtgagctccatgagcaaaacgttagatgcagtaatgtaatgccgtaaataaatggcaaatctggagatgaatccctgggctcctaattcagtgctccttctacaatactaggtaggcagagatgacaagaaaaaatgttggaagtagcaatgggtactcctttccccattccttctgtgaagggctttggtttcatttaaaaagtagaacactctaaaaaacttggctcaagactttttggctctcataaagcaacattaaaacaaaatggccccaggtcataaagattgcattgtactgagaaatgacctcgcacagtggtcaacctcagtcccagacaagcttgcaaagcagaaaatcttattttccacttttcctgaccagcttttctggagccctgagctctctttcttatgaatggggacactgagctaagaactgagatttcctgatgcctagataggatctttactccttacccatatttttgacacctggtatctgacctttgcaggccaaagggccagtttctgttgagttctgataaagtcagtccacaagtgctatttgctggtcatctcatctgtgactatcttctgctgggcattggttccaccttattctaatctctgattgtcaaaatacaactcagtccttgcagggatagtggaaatgccaatgaattgggcaattttatagtgtgtctagtacatgccataacttcttaacatgtaattttaattctcacaacaaacttatgaggttgttgctatcattccactttatagacaggaagatggaggcttaaaaaggctaagcaaactcatcagtggtgaacagctggtgcacagtagagctgggatccaaatgcacaactgcctgatctcaaagcactaatttttacactctgtcattagcacctgaatacttttgttttcaaatccccagctcaccgggggtttggaccccaaattttaaagaaacactgtcacccaactcaattcttctgaccatgaacaaacatcccaagcagtatgagaaattttagcagccatggtgcagagctctctgaagcctgatatagattaggaacagaaagaagattagatgtgtgtatattatggattgtgggcataagacttggataaggaaaagattgcattgtactgagaaataaccttatttgagggaaggaagagatgttccactgattggccagatcccaagatgctagcatgggagtgaaggtgggcttggaaggggaaaagaaggaatccacagccctctttctgccctgggtggtataagaaagttgaaggaattaggggaagacgagtgtgctcttggggatcacatcccttggagggagaagagagacttagagacagtgagtccccttctacttctgtattttgtatagaacagacacttctacaccttagtttctttgaattccaggtattggaaacagaaataacaaaaacatgtacattttactacttcagttctactgaaaatcagattccttgacaagctgggatggggctgtcggtgagggatcatccctgtaatatcaacttctgggtgcagagtagctacagagggatgcaaggggcaaaaagagtctaggtgttcttgtaattatcaaccaatagtggaaatggcagagtgacagagtaaagtagggaggaaggggagaagtggccagcaggcacagtgctgggggagctgacagtgaatggcgcagggggcagagctgggggagagcggtggaggagtctgagaaggctccttgtgaacatattttgagctttggaagatgaggtaggtgggacgcacaggaaggagagggacagctttcccaccagggaaccttgtttggagaagttactgaagttgatgcccacagccctgtactgttgtttggccagagtggaggactgtcttgaatggtgtatgaaaatgaggtgaaagatgccatggaaagcacctgcctggggtggctacaacatcttgctgcctctgtttatcaatctgtcaaattggagaaataatccgttttatagaaatgtcaggaggattaaaagtggtagcgtatgtcaaggatccagcccactccttggcataaaatagatgccctgtgaactgtcacttcttactcattagaaagggaagatgatgggtccttggggcctctttcatatacatttaaatggttgttgaaagggatcctggagcccctcttggatacaatagaatgcctccattgcaccacaccccaagacgcaggagagaactctgctgggcacactgtagggcaccagcttgtcttcttcctgctgtagcttgcagtagggaggtctgggacctgataatgaggggcagaccagcagggctgagaccccaggttacccactctgatggcctctgccctgctgcttgtgtgtgttcacccatgagtgtgtgtgcctgtgcacatgtgtatatctgtgctcatgtgtataaatgtgtatccttctcagtaactctaaagcctagagaatgacagacagaggatgggcaaaatgaaagccaaagataattgtcattgatctatctacttaatggcctgaaaatgcccaattagagcagggtgcatggctggctgctgagccagagggctgagggaattctctgggctactgctcatagtgcactgcttttattgaggtgccctgtggatagccaaggctttcttactcctgcctccctgggagaagggtcctggattccagacaccagggaggtatgacatgccacccccatacctgtcaccagtaatctaatagtggcttcctggcttcatctctgggcttggcatgtgaggacggtccccatcatgaatcacaagatgtatttcttaactgtcttcctttcctttttgcctctgaactgtgagctgaagatgaggtgaatgtagtattatcaagatgaacagagtccagtggagcctggggagggaggctccatctggtggcagccacatgtaattctgagggaccacacttaagaactaaatgcactgtggcttgcttcccagctctggaaggtgtgggatgttaggcagctcacttggtctctctgagcagaggcagcaagcattacgatgatatctaacaatttctggtcctttccagtgcactgtcctggctagagccactaacaccccctgcctgggttattaaaagatgagcacttcgcatgttgttcactgcagtatccccactgccttaaacaatgactgctatataggaaggacttagtaacaatatattgaataaataagtagaagacaagatgactgcctggggcctcaaatctgcaaacgccttatgtgggcaaggatctttctaagacagggtcatctagaaaccacagtgaacaccttctacatgcgcagcctgcattgtgaaactctagggtctctatttgtgtcaaatacaatgggggctgtgcctctgaggttgcaatgtgggggactagccagacctaagaagaatgaagaactctcagtctttgcacttgagcttattgttgattcatccacataactgtggtctataaaactattcaactcacatgtacaattttaggaaaagtcatgtttgaatgattttcatctttagaaactataaaactgtattgttaaaaaatattctgagaacccatttatgatgttaaaacttcagaaaaatagaaatagaggggctgttcttaacttgatagagtgcatctccaaaatacttgtagctaaaatactcgatgctgaaagaccgaataccttccccctaagatgtggaagtaaagatatccactctcaccactcattcaacatcgttctgtaagttctagccagtgcaacaaggccagaaaagaaaataaaaggcatacatgtcagaaaggaagaaattaaactaaccctatttgaaattacgtgattgtctacatataaagtaccaaagaatccacaacaaaaccgtctacaactaataagtgaattcggcaaggttgcaagacaagatcaatatacaaaaatcaactgtatttctatatactaacaataaacacatgggcattgaaatgcagaataaaatatttacaattgctcaaaaaataaaataattacaatctaaatatgtacaggactgacttgtatgttcaaaactacacatgctgatgagagaaatcaaagatctgaaaaatggagagacataccatgttcacggattgaaaaactcgacatatcaactcttcccaaattgacatacaggtttaatgcaatttctatgaaaatcctagtatttttttaggaatagataagattattctaatatgtgtatgaaaaggcaaagtaactagagttgctgaaattattttgaaaaagaggatcaagtggtagcaatcagtcttctgaatttcaggacattacacagctacattaatcaaaactgtgcagtattggtggaggaatagacacacatattaaagaaacagaacaaagaaccaagaaattgacccacacaaatatgtccaacagatttttgacagaattgcagaagcaattcagtaaaggaaggtaaattttgaacaaatgatgctggagcaagtggatatccataggccaaaagatgaacctcaacctaagccttactttaactattaactcaaagtggatcagagacttttgtataaatggtaaaactatgaaacgtagaaaaaatatagataaattatttcagacttgacactgaaagtgtggtccgtaaagaaaaaattgataaattgaatttcatcaaaattaaaaacttttgctatttgaaagactctcttaagagggtaaaaagacaaggtacaaaatgagaggaaatactttcaaattacatattggacaaagtattagtatttggaatatataaagaactctcaaaactccatagtgaaaaacaatataattagaaaatgaacaaaagttataaagagacatttcactgaagagaatatacagatggcaaataagcacatgaaaaatgctcgacatcattagctattaggaaaatgcaaattaaaaccacaatgagtgatcactatccctctatcagaatgaataaaataaaaaagagtgagaactccaaatgctgacgaggatgggagaaactggatcactcagacattactggcgagcatgtaaaatgacacagctaccctggaaagttgcaatttcttaaaaaactaaacacacgactaccatatgacccagcaattgcacctctgggcatttatcccagagaaatgaagacttatgttcacacaaaaatcagtatgcaaatgttgatagcagctttattcgtaatagcgaaaacctgaaacaactcagatgtcctagaatggatggttaaacaaattgtggtatctccatattataaaatacttcctggcaataagaaagaacaaactattgatgtacaaacaacctggatgaattgcctgagatttatgctgagtggaaaaaaaaagaaacagtctcaaaaggttacatgctgtatgattccattcatataacattcttgaaatgatagttacaaaaaagcagaacagattagtggctcccaagagtttagcagggactgaggagtggaaggaaaggggctgtggctataaaagggtaacatgaaggatccttgtggtgatagaggtattctaccttttgactgtgtcaatgccaatgtccaggatgtgatattgtactatagttttgcaagatgttaccattagggtgaactaggtaaaaggcatacaggatctctctgcattatctcttattatttcttatagctgcatgtaaatctaaaagtattttaagatagaaagtttaattttaaaattaaagaagaacaaaaactacacatgtgacaaaattttgtagaaacacacacacacacacacacgagtgcctgctaaaccggtgagatctgagtaaagtctataatctagctaattgtattggtctggttaagtgtattgtgccactgtcgatttcctggttttgatcatttgttatgttatgaaaagtgttgagagaagctgggtgagtgataagtacgtagaacttttcgtattaattctgcaacgtcttgtgagtctataattatttcaaaataaaaaaagtctttaaaaagaaccgagaacaaaaaagaaaccatttattatggagccaaatgtaaaattccaacactgacagttctgttagaactgtcgccactcgtctggatgtgcattcgcaagctgccctgcgagtgctgtcaattgcaaattcagtcaattaggactcagcatcaggcagctggaatgacacttcctctagtgaagcctcagagagcttacttatgccactcatttcagatggagagcaagggtttgaatttgccccctctagagcccatgctcgcacttctgcaccgtatggcaaggttgagtcaggcagagcttgtcctcaagaagcccgcagtctgctgtggagagaggtgggcagtaaaacacatgctccagctgtagccatgtccctgtctggaccagttaactcaattcagtttcaacttgcagacagctccttcaagccaatcagacatcagagaaataaaaaggatgtgacaaaagagagtgaggtggagaacacagtctccctctcctggacaaactgctctgggaaagtttgcacttggaggtagatggggatgaagccaacacatcatcccgctgtggtgtggcaggaatcccagaaaggagtgtgtgcatgtgcatgcgtgtgtgtgtgagtgctgctgtaacagaagggcctcatctgtctgcccatctgtgaaatggggaggctgccaaaattcctcttcccttgggttctaacagactcccagcaagaatggaaaataagatattggggctgatatttaggtccttggacaataggatcaggacctagggatgtgaagagcaacagaggctgctctcagcctttctgtaagtgccccaggtgggcaggagactaatccaaaacaggagagacaggaggtctaattgctttttgctggactctgcctggagactctgattgaataggcctaggacactggaatgtcctcagacccatctcaagctcttgtgcaagaggcattaatagtagccaacatgcattgagtagcagttatgtgccaggtatgtttttaagcactttatatacatgatcttattcaatcctcgcaataactctgtgggcaggttccagtattacctctgatttatagttgaggaagttgaggtgcagactgtccaattttcctgcataaagtcacacgttagtggcagagctgagattgtaatttccagctccagaactcatgcttttaatcacaactgtagaatccctccttctgctatttgctttcctgctgggctagcctgagaaagccggggccagtcacccctcaactccgttgctgatccaagttgcaatacagatgggaggagaccgttcttcctgtctcagggaagctgccgccttggcagtgagaggaatgcagcatttatgcagtttgcatgtgtgcctctgtttcacaaattctccagtgcacaccaacagcactgccagtgactgatgaagaaatatggtttagaccaccagaaacctaaaggaccaaattccaggggatgagaaacacacttggcctggtaaagctgaaaggcataggggttggtatcaagagatttggaatccaattccaattctgccatttcctggcaaatgatcttggcatgcttttactctctttatgccttagctacatgttctaaaaaagataataatatatttgaccctcaagggtgttataaagataaagtgctggactacaaaaggctttacacgctaagctttattcgaatggctggaaccattgtcgtgatttccagggtaaaggaaactggagatccagatagcggagaagagcttgctggccttcttccctgttctctattggcaaaggggctgcctttagatttctgctctgacaccacgtaatcagtgaggcctccctaactatggcatttacaatagcatcatcccaccctggcacctctcctatctcctttctgtccttcagtatttatcatcatttgaccacactgttttttggggatgattacataaaacaatgtataacacatctaaaaattttaggagctcagcacatattatttactggggtagagggaactctttctccatgcaatttaaaaatgctcaactggtgtagtctcctggaatgagtattttgccctcagcctcacagaacagaagctaggtcaattacaccttcttgtctgcctggctccaggccagtcaatgatctcccatctcaggcatttggtattgttcttttgttagtttctaaagttccagtttcccagaagcttaaggaagcaatggattgctttggccaccttcctggtcttttaattaggaagtatttgcttcatttcagaacttgtgatatagaagaagaaacatggaatctggaaccccccagagctgagatcaggacttagttctaccacttatgatctgtaaatattgttattattacttaaaaatgtgataactaagggatatatatttcctgatatatgcaggcattgtacaggacaatctgtgtacataatctcatttgttcctttaaacaacccagaaaggcaaacattatattctttttgcagatgaggagactgaagtttagaaagtgaaaaagttggagctgatctcaggtccatcaaaatccatggatgcagttctttctactatatttaacatactcagtgaacctcatttttctcatctacaaaatggatctatcaatatttgtctcatagaggtactgtaatgataaagtaaggtgctgtctggctagaacaaggtacttagtaggagctggagctgtgcagaatctctcttccttcccccaatccctgaaggaaagtgagcatatcaaaagagctcactagagcttttagttgagagcacagaggtcaagaggagaccaataatttgcagaagcagaagtgaagatcaacatttttcctctttaacagaaactctgagcagctgtttctcccctaagcacatctgaactggataaggattgaccaggaggcctttgtagctctgtgcttggcttcttggctctgagccttaatcaataacctactcctgatctgtaagacataaaatctcaaggagtgacacactttccttcttcaaaatagttcttggaattcccatggtctagcaatgtgatgtcagatgatgagataggcctgggaggcaaaggcaacattatttatagacaccattgtgtataacatctttgtatctcttagagtcttgaagccaatgtgcttggcacaattagctggctttgatttgggacccagagctctcagactaaaactactcccaagtttactagaaataagtccacactaaatgaagtacaattcagaagaagtagggaatgtggtaaaacaggccactaagaagctctacaggatgctaagccagccatagaatgagtttttcttggtcaaaaagaagatggcttggctggcaccatggctcatgcctataaatcctggcactttggaaggctgaggtgggaggttcgcttgagaccaggagtttgagatcagcctgggcaacagaatgagacccatctctataacaaataaaacaacaaaaaaagaagacctcctaagtcttgaaaaagcagtcttggacagtgtcttgactggctcttctctcaatcccccactagatccaccacaccccatacactgggacaagtggtagcccttttagaatagttttctggctccttactgattccaccttcatcacagtgttgtcaaagaaccagacagacctggtgcctcgggaaagcccttctgctctacagacctcaattaagcctacctgtaaaactggaataatttcgttgccttggagattactgtgagagttaggtctctaaagcacctggcacaatgccttgcacatggtcattgcttcctgtttctcctccagttttccccaccagtttctcaattcctaatgccagaaatcccagaagtctgtctgggctattgctctgattcagattcatccaccttcctagatgttgaagaatggtctgcccactgcattccttctagctgccattgcaattaatctgtgccaatttcctacccacccctgctccaaacactgacactgcaatctctgatttgctcttgggcttcacagtcttgcttgtctatcttgggctaacaactccatctgaacattcttgaattgcttgactgttccaggaggccctgtcccttaattaccctgtctaatccatcctgttcagatctgagtttgactctgcaaggctgcacctctattttgggaatgattactgctatgatggttgattctatttttctatttttcatgtccaataaatagagtaatgatgaaccatgatgcaataaattgaatattgagtgttctttctattcagtccccatgtagaaaaaaatcttaatgagttctctatatctatcatgaagagagagaagttttcttccttttaagcttctcaagttgggttggagatttaactcagtgatctcattcctgtttcagaagtgttaacacttctgagttttggggggatagtattattatatatgttttctcttgtttgcttttagaggcagcatggcatagtggaagtagaaagggcccttaggatatctgtaacatttaccccagaagagccagtcatgagagtcttccctagaaactaaacctgagagggaaggagaaagaagaaaaaaggctttatgctcagagaagctcataatcatattatgggattatagcaaaaaaacaaacaaaccagaaatgacttaaatcttcaacaataagataaaggttaagtaaagaacatataatctccaaaaagagagagagagaggaaggagggagagagaaagagaatcagattgacaccagactttttataaatgacatgaagaccatgttaatggaaataaggtaataggctcaattcttacattaaagcatcagcttcttggcttgcttgtatctctaagtatgtccttgtcccccaacattgcaaatggcctaagaccaacacgttcctatttctggaacagaactcaaagcatgtctgccagggtccccctcagcaagtctgaagtatgcccactgcacttagtgggtatctccaaacctgcctgaaaacctctgctctgaggctttccatatgctgctctctccatcaggaatatgctctctattccttcttcaagtctcattttagaggtcttttcctccaggaaggcctcctggaacctccaagcctgtgtcttgtgttccccctctgtgttttcataacaccccatgttcccctatggtgggtctttatcccctcctgagttataatcatctgtttacttacttgtttctctaacaagcttattttccatggggccaaaaccctagacaaattctcttttcaataaccccgagtgttgctgaaatcaaaaggctatgaagaagcagaagtcttgtgaaggtgttgttgggaaagagaattgttcagatatgggtaagccactgaaaagtgtcttgatggttcatctgaacatgggctgagaacctgaagcagatacagaaagcaagatgaccatgctggaacaatgaggacagggaggatgggcagagtggctagggagaaggaggtcttggatgaacatctgagatagaaaatgcccctctggcggctcatgtgtgctctcctgatcacatgctctgacatggcaggccccagcccattctccttacgaacgacacttgctgggaatccctactgggcacacacaacccagtctacaagatagagtggtccaaaccccccatcctgggctgtggtgcttggaagatgcaacacaccgactggctacgctgcagttactgcatctttctggctggctggcaagcaaacttcccactgcctttctccccaggcctgaccccattatgacaatggagccattgttctgaacaggggccatgaggcagctgggactggccgaccctatgctggctcctcacatctcagaagtcaagccctcagacagatcaaggaaagtgataaaattcagtgggaagcaggacagagtattgggggtcctgagccagcttcttcctctcagttctgtatcgtgatgggaatgaataatcaccccaattacagagcaacctgaaggagacaaaatcacttaactaaatgaggtgcttggggaatggaaggtgggagcagtctgcaacgattttggcagaaacttctgggccagctcccccgaaagcttatatgaaaacaagcaatatgattatcagagctccaagtcagctgcctcagacacctttggcagtttctaaaaaaaaaaaaaaaaaaaaaagtctgctgcataattgtcatctccaggatgtttagaaaagggaacactggattaaacttagttggaatccaacagcgatctaataaaggcatgatcagaatatagggaggtgtgctcaagttaattagagcctgggggaagtgtgggcttggctgtcttcttccaacaactcctcagggatataattagctcctactacttgggacacatgccctctgcctactacaataagccagtccagagaagcaaaccatgacaaagactttgggctgaaggcttgcctagccctcacctgaggcctcacctgagcctgctattccatctcatacatgctgctcagagcctgggcttccatctgggctcagtccaatttgctactccttagaagtggcctgagcccagagcacagtgaaaagcaagacaagacaactaaatctgatactaaaccagagagggacagaggcccctgcactcatcagaaggccggatgatcttgagtgagccaggaagcgaagcataggaatccaaattccttttggccaatggggaaagtttgtgcagtcctccttcaggaggtgttagtgtgtggtttaaaaaaagcctttcagacattgattctgtccattttctgttactgcacctaaggcagcagtttgctctggaatgggagagcaggcatgtgtcttggtctcttggggctcctcatactgggtagtttgtaaacaacagaaatttagtgctcacagttctacaggctggaaagtccaagaccagggcactggcagattctgtgtctggtgagggcctgttgctcgtagatggtgacttcttgttgtgtctgcacacggtggaaggggcaaaagggctccctcaagtgcctttataagtgcatgcatcccattcacctcccaatcctctcctaaaggccccaccttggctggagctgcggctcacacctgtaatcccagtgctttgggaggctgaggtggacggatcttttgaggccagtagtttgagaccagcctggccaacacagtgaaaacccacctctaccaaaaatatatttttttaaaattagccagccatggtagttggcacctgtaatcctagctactcgggaggctgaggcaagagaattgcttgaacctgggaggcggaggttgcagtgagctgagatcgcgccactgcactccaacctgggcaacagagtgagactcttgtctcaaaaataaaaataaaataattttttaaaaaagccctacctcttaatcccatcacaatagggaatagatttcaacgtgaatttcggaggaacgcacacactcagaccacagcagcacgcagggcggagggtcctagtgtggacaccaggaagactgtggctggccactcagccggggaatattcctgtcttgtctctcacctctgcagttccttgaagcatatcattacattacggttgctttgcctgactcgagatcctcaaacccaacccctccactccagttccttcttagtacagtcctgagccacttaacaatgacaggtatatgttctgagaaatctgtcattaggcgactttatcattgtgcagacatcagagagtgtgcttacaaagcctccgtggtacagccgaccacacgcccaggctatgtgggagaacctattgctcctaggccacaaacctgtacattatgcgactgtcctcaatactgtaggcaattgtaacacaatggtaagggtttgtgtatctgaacaaagaaaagatacagtaaagatatagcataaatgattaaaaatgatacacctggcggggcgcggtggctcacgcctgtaatcccagctctttgggaggccgaggcaggcagatcactaggtcaagagatggagaccatcctggccaacatggtgaaaccccatctctactaaaaaaatacaaaaaattagccgggcgaggtggcaggcgcctgtagtcccagctactggggaggctgaggcaggagaatggcgtgaacccaggaggcgaagcttgcagtgagccgagatcgcgccactgcactccagcctgggtgacagagcgagactctgtctcaaataaataaataaataaataaataaataaataaataaataaataaaataaaaataaaaataaatagctgggcgtgttggcgcacgcctatagtcccagctactcaggaggctgaggcaggaggattgcttgaacccgggaggaggaggttgcagtgatccaagatcgtgccactgcactccagcctggcgacagagtgagactctgtcgcaaaaaacaaaacgaaacaaaaatgatacacccctatagggcacttagcatgattggatctcgcaggactagaagctgctctggttgagtcagtgagtgagtgatgagtgaatgtgaaggcctaggacattcctgtacactcttgtagactctataaacactgtccacttatgctacatcaaatttacaaaaaactatttttctttcttcaacaataaattaaccttagcttattgtaatgttttggctttctaaactttttaattaaaaaaaaatgactcttgtagtagcacttagcttaaaacacaaacacattgtacagctgtaggaaaatattttctttatattcttattctataagcttttttctgtttttaaaattatttattatttttactttttaaggatttttgttaaaaatggtgtacaattaactttcttttttaataagtaggagtacactctaaaataatgatgaaaagcatagtataataaatacataaaccagtagcacagtcatttattaaatattatttactgtacataattgtatgtgctgtgcttttacctgactggcagcatggtaggtttgtttacaccagcatcgtcacaaacatgtgtgtcccgtgctgcgctatgataccacatcagtaggtgacaaggatttttcacctctgttagactcttacggaaccactgtcgttaatgcggtccatcatggactgaaacgtcgttatgcggcccatgactgtattcctgaactttgccctcccactgcacccacacgttgagagctgcacggcacttctcagcccacaagcccactttccatgcaccaagcccaccccaccttacacttggcccctggctccttaaccttgagctcagcctccatcttaaggtttcaccaagctgcccttcactatccggtctgttggagattttccagctagactctgctagccacgctctgactctgtttgacccagctcccggggagaagccaagccgactcccttccactccctctgcccccgctgctgtcttacacagccgtaccttcctttcctttgccccctctcttggctggtgctgagccacatttagcaccagcctccaagagcaagcaccctgtgctaacttgggctcgtgtctcgcaagctaccaccctgatcttagaaacccgaagctcagaaaatagttcctatcttatgtgcgttatactcttcaagaaggtagttcgttttgcatcgtggaaggagcactaaactaggagtttaaagacttggatccacccttgattgcctcgcttggggctgccccattgcacaataacgagggccatcatctttgtagaataaatagaaacagagcaccctgaagttgtgtaaccaactgggttcccctggccaagtctagtggcatggccttgggcaagacattgaatgattctggacctcggtttccctatcttattcctagccaagtgtccttccttcagaacctcaagtttaggcaggggagagtagttgggaaatgatacctgagctttgccttatgctctgctagcatggagaagtggaaactgatttggagaaatagtttgaaggctgggaatgaaaacttgtttgcaacctagtcatgctgtttgattgattttccatgtggcataaagtcctggagatattctgaatgaaagtcaggcctttcttgactgtcccagtacacttgtgggaactgaggagagggctctggcagaaaactgactggcggcagaaataaaaccaccatagaacttaccttggtatctattcatccgctgtaacccacaggtccctgcctggttagactttacttcgctctgtccccctctactcatccctactttccttctcccagcaacacccttgggagggaagaatgagaccattcttgctcacttcttccttaagaaataatacttcctactatgcattatgtcagagcaaggatcttctatgtatatcgtttaatcctcaccagaaaatttggcaaggtgaaaatcattattactctcatcttaaaagtgagaaaattgaggctcagagaagctaagccacttgcctcaagccacacagcagttaggtagccgaagctcagttttcttatctgtaaagtagagatgaagtgcttcctacctcataggattgttgtgataattaaatgaagggtgtgttatgaatttagagcagggtctgataaaagtaacctctactcaagccaggcatggtggctcacgcttgtaatttcagcactttgggagaccgaggtggacagatcacttgaggtcaggagtttgagaccagcctggccaacaaagtgaaaccccatctccactaaaaatacaaaaattagccaggtgtggtggggggggcacctgtaatcccagctactcaggagactgaggcaggagaattgcttgaacctgggaggcggaggttgcagtgagccgagatcatgccactgtactccagcctgggtgacaaagcaagactctgtctcaaaaataaataaataaataaataaataaataaataaataaataaataagtaaaataaaaaatgaagtaagttctactcacttttagtactgtttcctccctccctccctccctccttccctcccttccttccttccttctttcttcctacttgtctttttcttttcttcccagaatttaagggtaattacaagaatatgtaagataaaatgagaaacatttaagtaactttcttaaggtcacgtaccagcaagcaggtcacaaatataagagttataaagttaaagaaatccaatatttttcaaaagggttcgtattcaacccgggtagtagtgaaatgtaaaggggaagacctgccaattgtggcctttttgctgactcttgttaggtgacaccaggcaacaggtctccacacgcactcgcatgcgcctgcacgcacacacactgacggagaactcaatgcacgagagacatcagtcactcaggttcacgatctcatttcatcttcaaaataactcagcaaggtaagtatatttcccccatttggcaaatgagaaaattgaggctttgtgagcttacccaagctttccaggttcacgcagcaggtaatgggggaatgtgagtcaaatccgggtttgtctgattccaaaatccttgcccttttgcctacacaatgttgcctccctctaagatcataaatatttctcagtgtaaatagtagtttctcagtatgagctttgtaaatggctctcagtggatcctaaaatgtttacctagagtgaagaagtgtgttttgctcattgaatgtaactgaggctaatgccgtcgttttttttttttcttcttctccaatcttcacagaagtatatgcgtgctaaagtgtgcttatagagtcttccttttagaccttacgtgtaaggtggcagtaattaaatgcaggttaaaagacaatttgtatttcattttgaaagtcttccctgtgcctcgaggttcgtggcagggctgagttgaactgtatgtaagtaccatgtggtaggggaactaatttataatttaatgcagcagtgggggtatggggacacagactgtaattttaaaacaagggaaagacttgccaacggatagcaggtttgagtttttatcagcaactgtgattgctgtcaatggatctgtgcccttccctgcacactccactgcctgctctcattattaatctctcatgtcttccaaatgttctcagctgaatcccagtgtgctcagggcagccctcctcagagtccctcaggccctacctaccgccagctgccccaaacctgtcctcacccagggctgtgtgaattctttgcttttactgttgcttttccctgacctttcagcctgtcttcatcctggggtattttccaagcacctcctttgaaatgcgtcctataaaattctccatgtctaagaggggtcaaggtttatctgatgctatcatctacctcactttctgcacacttacgacgtcagccttggtgcagttgccctgatagactccgcctcctctgaccttagggcccttacacatgttgcttgcttcctgtatctagacatctcttccctgacttttcacctgggaaagtatgttttgtctttggatctcagctcaattggccttctcaaggaagtggtctctggccagccagtcaaagtgaaagccttctagtctgtgctttcctctcagcagcctgggtttttcttcattgcatgcctcacaactgatactgaaacattcattcgtgtgattccttggcttatatcaatatgccccactctgcagtttggtagtttccaaagtggagtatacaagatgatccaatgagagctgagaagataaaatgagaattcccattgacattactctgatctaaaaatgtaaaattaagcctcacatatttcatatacacattgacactagtgcctccacttggcccactgtcaggcagccaagtgtcacatatggtccccgagcatccagagaagagtgggaaaaagtccaagaaatggacagttgatagagcagagctcccccctcttctttaacttgcagatacattgtgatggactcagttcacgtgttcccagcaaagaggatttttacaatatattgttgagttttagttaaatcaacccttacaaaatagacaagtggcttcaaaagattcccgcaagaaaccgtgagctgaaaatgatgtgagcaatgcaagcacaacagtcttcctggtgctatctcaccatcagccagatttctaggctaaaaaccaccctcatctaatcaggtccaaaaagaaaaagcccaaaaagctgcaattgttaaagtgactctttgaaatatccaagcatataatatcattcatgatgttttgtcaataaaaattttatttttttttttaagacaaagaaacaagaggctcagaaaggtgaaatgagttacccaaggtcacacgattcctcaatttctgggctcagaccgtgaaggcagggcttaagcattttaaggagatactgtttatttcctctcttcctcattgtttgaaagtttccattttgtgcattttttattattctcacaaactattggaaatgtggtccatatatacaatttatgcataaatgcatatacatatttcgaggtgtactcaaaagtatgtactgatgggggtgtcgaattccaattctgtagacaatggcaccgtgatgtaaagccacagagaccaaagaccataacattttacttatcgttggcacagagggtagggtaggaatggcgtacccatgtcgagggttggcatttaggttcttcagggcagttgtttctacttgaaactataggacatattgaggccagatcttgaacaaattaacaatcttttaagaaaagacaaggtttcaatgcaaagcaaatgtggctgccaacgctcttgattcagacattgcagttagaaaatcatcttttgttgcttaagtgtgctctcagaatctctcttcccaatccacattggaacagataatccaagtatattttccaagcaagttcagtggtctttccacagaagaattctggtgaataagattttctccatctaattgctcaatgaagggaggaggcagaattaaatattcagaggtctcgaggggaggttgggagagggagtatctccctgtggctgcattctccaaattgacttttgcttctctctccagagactgtttgggcctcaccacctcagcaaaaccttccctaagtgcccaggctgggttaggggccccttctctgtgcgtgcgactatgtatttcttgggaaatacataggattacatacagtaacatatatttacatacagtgtgagctcctggacttcttttccatgtctctggcacccgacgtgagaatggatgtctggtggatgtttcataaatgtcagaaccatcttgtcatttgcccattttccccccacataaccagattgttctttcctggtttgattataagctcctggggaacagacctttgtctctactactgggatgaacatatgttttatacacagtaggcactcaataactactacttgttgattgattgacagattgctagaggactgaattcccaacaaccagtacaatagctggcagaaaaggaaacgttaaaacaaaattaagaaacgggcagagtttggggagattttgagtgtgtgggtggcagaaggtacttttaggttggggtcacagtgcagcgggccgagcaccaaagcacagatattctagaactggggttctacatcagactactactgtgagagccaagaggctcaaagcccccagagggtgactcattcttccagccctccgcctcctcctgcctgtccaggtcatcttgatcatcccattatcagaactgctggaggaatcatctggaaggcttgaagtgactggggggcatccgctgggttgtgagagctgctcggagggtcccttgtctgtcccagtccacctcctccacccaccttatgctgtcaccccctgcccaggactggacctccattcaactcttctgagcagaaggagcagaaaccatcctatctctgcactggcctggaatggacagtgctccccagcatggttctagggagttgctaaggtctgctgccccagaatcgtttctctgctggtctgctgtggtttgggttgccagataaactgcaagatgcccagttaaatttgaatttcagatcaataaataatgattgtttagtataagaacatcccatacaatatttgggaaatccttatattaaaatattatttgtcgtttatctgatatttaaatttaactgggtgccctgttttttatttgcggaatctggcaccccttgttatggcttaaacaggtggactatgggacttagtcagaaagcaaaatcagcataaagcgggtgagatggcgtgagtcactgatgagataagaacgattctaaatctcagccggaaaccacctattggatgcacagtgatccgcttgtgtgcatctggcagcttggaaattctaccacgccctcgccaagggcacgcttagacgcaggtgtggttggcacgggttctagagagtgcatggttaggtgcttccagcagtatgggagggcaggagggaggaagaaagggaggaagacagcgtgcacatgtgctttgtggttattgttaagtaagcagaaacacccacacaacggaagtgcatagaacacaaggctgttaaccttatacatatgtttctctctctgtcattctgtttttcttccttttcactcatcctctttcttctcttgctacttacttacttacacagtccatgatggtggtaaaatggccacgttgcagaatacagaggggcgtgggcttccgaaccagacagcttggattttggttctggctctgttgcttattagctgtgtcatttaacctttatgaaaacctgtgttagttctctattgcagctgtaacaaattaccaaaaacttagtggcttcaaaaaacacaaatttactagcttacagtcctacagattagaagaactaaccttcttcttactcagctgaaagcaagggttcactggggctcactgggcagaaatctagtcgtcagaaggtcactgggatggtcccaaggggaaaatgggggaaattctgacagatttatttagtcactttatctataagcacagctgcttaaggaaaccaaatggcctgttgccacacacaacctcgtgaccattatcggataccagaaagtccaggcctgctcaaaacaagtgcagactggagtaggaaaactacagttatctttagatcaccaacatattattataatactaaaaaatcctcccctaagaggagaccaccgccattttgcatacatatgaggtaggaagaagcatgtttgtgaaccgcgctggcgtgtctggaactccaccctgtgcctgcccacatacctctctgtccagcataaagctcccattgctccccctgcctggagagaaggcatctttagagcacaagctccccttctccattctttggccattgaataaaatctgattgcttctccaatcaaatgttctttttttttttttttttttttttttttgcagccagtataaagtagaaaaagaacacaacttattggtgccaagaagggctgcgttcctttctggaagctctgggggaaaatccatgcttgccttttccagctgttagaagctgcccacatcctgtgggtcaggagcccttcctccatcttcaaagtcagcagtaaggggcaaagttcttctcatgctgccatctctctggttttccgcagccaagaaacagttccccaattttaagaacttgtgatgagattggacccacctggatagtccagggtactctccccatttcaaggtccttaaatttgatcacatctgcaaagtcccttttaccacataaggtcacatattgacaggttcccaggatcagggcatggatatctttaagaggcccttattctgctgacctcagctttcacatccttatcagtgcctatgtcagagatggttgtgagggcagaggagttagtacatgtaaagtgttgggacaccgtctggtatacagtaagtgttcatcgttactgcctctgctgagccaggccttgtgctcagtgcagtagcagatgcaaaggtaaattcctcgtacccttccagatgctgccagtgtagaagaaggcttcttggcaacactgaatttcccttccttgaatctatgctcactaggcagccttctgaactgcatctggtcctgcaacagacgccgccaggaggaagtagcccatgcaagtggtctagcatgggccctgcatcctccatctctgaagacaaacttcaaaatcagactttgggtttgttgatctatttcttttgcacttggttgttggaagcctgttccctagagggtcatccttgggtaagtgaccaaatttcatatctgtgaacttggaaagctcaaaattcctgcctcaaggttcagccattctagaaatctaccccaggcaccacacatcgtttcattggaacaaagcagcaactgtctgcaacatgtaaagatgttatgtgaaaagggtaatgtattacctcagcagtatatctacctgtgctcattttcacatgagcaaagtccaagtcagcagacccaaaacagaggtactcctaagtgtgtatgtacataaatgtgtgtatatctaactaggtatgtaggtaagtaggcaggtagatagacagacagacagacagacatggaagagattcctcatttccttcaccttcagcagcagaagcatgtttactgttcatcacaacaattttataacctatttagcatttctgaggtctctctagctacaccactgaccagcttgtgttaaccccctgcccccaaatatagagaacgtgtgtgaatatggaaacttatgccattaagagatgtttctctgggaagagtgggggttgggtgggtggcgatgaaaacattaaacaaatgcataatacagaataagttggtgagatttcatgtttggtttttgctgctgcagatatcttcccctcctgttttgtttgttcattgtgtttttgtttctttgcctgcctgcctgtttagacaaagcagaattatcaggcacccataagacaaacaacctacagaggcttaatgaaagttagcgagaggacagaagtgcactgtctgaaaaagggagaggctgaaaaggttgagagattttaaggtgggcttcctgtagagacagtggagggaatgggggtttagtaaatgccatgagaattaggtactcatgcaaggctgagtgatgcagaaagggaggctggactttgggaaccaggacaccccaccctggcacagagcacagagcccaaacttgaccaaaacagagactggcagccttgggcagtggtcatatcagccatgtccagcagagattgaaaaccatggggcaccctgcaaatgttctgtactgcataggaggcctcccaggaattctggatgactgcacctcctccactgcaccgtcaaatgggtgctgttgaactacccaccagccatgctgctagaggcctgctaaggtgtcttctaatgcagagaaaatactcaagcctgagccagttatgttaaataggaatgctgaatcttcaggaccaagaatgtttaaaataaggaatcaccattttaaatgaagagaaaaagtgagaattgcaagcaactacaaaaacaaacaaacaaaaatgaaacatggctacccatctcaacggtgacgaaggcttcctggaacaggggaactagcagcaggcaatgccattctgagctccatccctggatacctcctttgatcaggcaatgaactactggagctactcttggactagatctccagccccctgatgccccctctaatccatcaacctcatctttctgaaatggaaacgtgagcacacttctctgcttttcaaaatacttctgcaagtttccatccatcaacaacaatggtgtttctcagactgggtacacaggctccaggatggtatggcaggacaacccccaggtaaatgtgcaccagtcctagagtttatcaattttattttcacattggtatatgtaaaagagtagtacacaaacttagcttaagttttaaagataaaatatgagactccctcaaagtgttaagcctggaaaatgctttttttgggctttgcctctggagctgtcagatttcctgttccttcatctatgcttttaagagatgaaaagtttaagaacccatgggacaaaaattcagattccatgggagtgctgcatgagacccgtctggctttacctcttatctatatctgcagctcctttatcaattactccatgatacaacttgctctttaggatagaaactcagagacttactctttcaagtggatgtcccatttgctcacatcccaagcctgccttgacctcctttcttcgtctcacatggcattctgtgctaattgctccccctccaacacacaaacacatgcatgtgcacacatgtacacacgcacacccagcatagcatttaaaatcctctgggtaataatcagaaaaaaactccttcaataataaagactaacacacattgagggttgactacgtgcctgtgatacttccaaacacttcatcttattagctctgccccacaaccatgatagcgttcccactggttggtgaactgttcactagacattgaattagtgaaagcagttctctatgactgacagccagaatgggatgggatatgggaaagacaaggaaggagggagaagtggactatttagtgttctcctagggcaacttttagtcagacctcatatgattaagacacaaagatccaggtttctcagcctgcgtggacatccacttgggagggtccaaaggtcttgggaaggctacaattagtaagtacatctttatgagtcaaatcacattgctggggggtaaagtccagattagatgtcagtgtctctatggcctggtctgggtcctgagtcgcgagatgcaccgcttcatgcttttattaggaacctgataaatggaaccatctatctttttattctcattctttaacgctaatgaaacagaagtcaggcttggaaccttgaaccttgtttagtgactaattccagccactttctgtgatcattacctgtgttgctccccactttaaatcaattgaaattgcactcttcttgcaaattggaatcacatcagttcacttttccccccctattcatttggaggtttgaaaagccaagaaaaaaaatttccagaataaaagaagtctctgggatccatctctgcacaaatgaaaaataaacctcccggttcttaacccttggcagtcatttttcttataccttgtcccaaaaggccagtttcacacactccattaatgctggctgccactgggacaattacagacagacagcttttcccatttgagcaacttcttaaatttaaaaagcaactgtgcaggaaggaaggagacatgtggctgctctactacagaccttgtaaaaggaggttcttctatgctattacccaccccctcccatacctacctttcctaccacacacaagagctgaaataaaagttgcatttcacttgtgttgtggctgttattttattttacactccttgcttaaaaaaaaaaaaagtcttcacttaaaaaaaaatacatcacccaaacatgtctgagattttttgcaaggcttgggtctgaacccagtgcctttgataggggcatttttcttagcctgctgtggctaaagatgggcatggtcggatttcactcgcttggattaggatggacttggccctaatattttgtttcttaatgattcttccaatttttaagtgtcccaagagatagctttgactttccaccccagcctgctgatgttatcttcctaggaactgctacatcttttaatacaacctgtattcaagttctccttataggacctgagagattcaactggcagcatttaggactaccaggaatctccagtctggcgttgagatgagacgcctgcagaaatgactggaacatacggcagagcctctgtggacaagtcactcaaccaccccagagctcactttctctatctataaagtggaaatagccataatatcaatatcataggtttgtgaaatgggtcaataaaataaagcatgccacatatgttacataacgcccagcatgtagcaagttgttagcaggaagtaatgacagtgataatggtgtaaagcttgggatgggggacataaagaagagaagttactccgtttgagagaaatcaggggtgacctcatagaggcggcagcattacaaagccctgtagggtttgacaggctcaggtgcaggtgcaggggagtgcaggaggcggtgaaggttgaagggagagaaactgaggatgggatgacaacaggcctcagggaagagtgaggagaccatttcattttaactgaggcataaaggggatgaggagggcagaggaggcaagggctgcctccaagagaagcccaggtgccagggcaaagggcttgggctttctctttgggtgagaagaagctatagcagacatggagcagatttctcttgaagcacacactgttttatctaacaggctgccttccagagcagtgatgtctgcatcaaagtcatataatatcagagctgaaaggcatctgaagaatcatctgatgcaaacccttttttaaagatggggaaactgaggctcaaaaggaggagtgatgttcaggcaaaggctccaggaccacatatcaccagggagcaggagaggattcctacactggggatgaaggacatgtcctctgtgtccctttcattttatggcttctgagatcctcgcccagtcccctgcacccacagcgatagcaaaactctctcggggagaaacatgggtcctggcagctctcatcttcaggggattaaatcctatgcatacttcaatatccaaagaagtggctccctgaacctaccttactgtcagaatcattcgtgaagctttgtaaagatgtgggcaagtgagacctgtcctttgagctggggattctgtaggtctgagctaaggtctgtgcatccgtgtcttttttttttttttggagacggagtctcactctgttgccaggctggagtgcaatggtgccatctcggctcagtgcaagctccgtctcctgggttcaagcgatttccctgcctcagcctcctgagtagctggggctataggcacatgccaccaagcccagctaatttttttgtattttagtagagacggggttt[143 bp omitted]gaaggtgcccttcatttctcccgacagtggggagtcccctcctctttcccagcgtattacagttcctttgcaatgatttttctcccttcttccagaaaacatatctgagttacctttgaaactcaccctcattcattcccttggccctaggacaatttttgttgtttgtttacatgacagatactaaatgaaaaaatgtttggtgaatgattgaaggaataactgaaatactgtgcaaatcaatgaataatggcaatagtagaagctactattcttagcacttgctctgtgtcagacatggctaaatattttttatgtgtgtgtcatttaagtcttgtgtccctatgaacaaaatactattttcttcactttatagatatgggaactaaattcagagagatgaagtgacctgtccaagttcgaacaacttgtaagttatggaataaataattttttaatgggtgaataaacaaatccatgccgctcgttctgtgatatccagggctctagtgctgtccctggctggcctgaaaaagaagcaatgttgctctcttctgctctctgccggccgaatgtagtgtagcacaaagagctcagaagtctgtcttaggccctgcatttgtggtctgagcccagaaattgaggaatcacgtgaccttgggtaactcatttcacttttctgagcctcttgtttctttgtcttaaaaatgagaatgacaatctcatcaatgaaaactacttggggatttgggggaaaccgaatcagataaacaaaggtgggcactttgcaagatttggacacaatagttacacaaataaaagcgtccgccttctggtgttgtggagattaatgacctaattcttgtaaagtgcttagaccagtaccaggcacatagcaagttaccactcaatatcaattaatgttatcatcgttatttccctttaaccctttagtgactcatcttctttattctcttttcacctgtcatgctccatctacctgaaatcttcctcttgtctgacacattgctcctccagctggatttgggcataggctcagggtggctgcagtgtgttgtaggaatgtgagaggtaccaggatgtcctgtctactctggcatcaggaattcccaaggggtatctctggccttgggctctgcacgggccccgtgatcagctccacacctgtttgttccaaggaatcatgagcttaagcagagtttggaagtctttgaaaaagcctgcaacctggggttcttgccttgggggacacagatgagcttcacggcctcccacatttgcttgcttgggtttataggtacatctcattttattcttttttaaattaaaaaaaaattgatacagggtctctgggtcacccaggctggagtgcagtggtgcaatcaaggctcactgcaacctctgcctcccaggctcaagccatcctcccacctcagcctcttgagtagctgggactacagacgtgtactaccacaccgggctaatttttgtatttttcgtagagacagggtttca[131 bp omitted]tgtactttgcagataatgcattttttacaaattgaaaatttgtggcaatccagcgtcaagcaagactatagatgtcatttttccaacagctgtctctatgatgtcacatttttgtaattcttgcaatatttcaaactttcttattattactgtgtctgatatgacgatctatgataagtgatatttaatgttactattgtagttgttttggggcaccatgagccacatccatataaaacaacaaatttaattgatgattgctgtgtgtgttctgactgcttcatctctttccctttctttgggaaattgtttccctgagacacaacaatattaaaattaggccaattaataaccctacaatggcctctaagtagtcaagtgaaagaaggagtcacacatctctcactttaaatcaaaagctagaaatgattatgcttagtgagaaaggcatgtagaaagctgagactggcctaaagctacgcctctttcactaaatagccaaattgtgaatgcaaaggaaaagttcttgaaggaaattaaaggtgctacttgtgaacacaggaataagaagaaagtgaaagccttcttgctgatatagagaacgtttcagtggtctggatagaagatcaaacatgcccaacattctcttaaaccaaagcctaatccagagcaaggctctaacccacttcaattctataaaggatgagagaggtgaggaagctgcagaagtagtttgaagctagcagagagaggctggttcatgaggtttaaagaaagaagccatctccacaacataaaagtgcaaggtgaagcagcaagtgctgatgtagaagctgcagcaagttatcgagaaaatctagctaagataattgatgaaggtggtgatatagcttgaatacatgtctccaccaaatcccacgttgagttgtccctcccattgttgggggtggggcctggtggaggtggaaggtgtctgggtcatggaggtggatcccttatggtttggtgctgtcctcctgatagtgagtgagttctcctgagatctggttaagtttgtgccccccatgccactgcctcgcttgcaccttcttttgccatgtgaagtacccgctcctgcttccccttccactgtgagtggcatgctggtgccatgcctgtatagccactagaatcatgaaccaatttaacctcttttacttataatttacccagtctcaggtatttcttggtagcaatgcaagaacagcctaatataggtggctacactaaacaatattttcagtgtagacaaaacagccttatattggaagaagatgccctctaggactttcatagctagagagaagtcaatgtctggcttcaaagcttcaaagaacagggtaactcttttgttagaggccagcgtaggaggtgacttaagttgaagccaatgctcattcaccattttgaaaatcctgggacccttaagaacatctattctgcgcccatggatcaagaagtaattttgacctttaagtcttattattcaagaaatatattttataaagctatagctgccatagatagtaattcccctgatgaatccgggcaaagtgaattcagaaccttctggaaaggattcaccattctagatgccattaagaacatttgtgactgatgggagaagatcaacatattaactttagtgggagtttgaaagagatgattacaactctcacggatggctttgaggagttcaaggcttcaggggaggaagtcactgcagatggggtggaagtgacaagaggactaagaagtggagcctgaagatgtgactgaattgcttcaatctcatgaaaaaactggaacagatgaagttcgaagtaagagttgttttttatgggtgagcaaagaaagtggtttcttgagatggaatctactcctggtgaagatactgtgaatactattgacgtaacaaaggattgagcatattacataaacttagttgataaagcagcagcagggtttgagaagattgactccagttttgaaggcgtgggtaaactgtgggtaaaatgctaccgaacagaattgcatgctacctgttaaatcctttgttaaaggaagggtcagtctacatggcaaacttcattgttttatttttaaaaattgccacagtcccccagccttcaacagtccccatcctgatcagtcagtagccatcagcatcaagctagcaaaaagattacagatcaccaaaggctcagatgatcatcagcactttttagcaatgaaatattttttaattaagggctgactttttttagacatactgctattgcacacttagtagaccacagtataatgtaaatgcaatttttatatacactgggaaaccaaataatttgtgtgactcactttatattgactttattgtggtgatctggagctgaatttgcaatatctctgaattatgcctttatatctgttctctgtgggttgaggagagttttcattaacatctccaagttctgaactatggtgcctggttcaatccacacacacacacacacacacacacacacacacacacactgtagaggtgagggtgtcacagcccagaaggaggaagagaggaattggcctaaagttgctaggggtgtcagtgggactttactgcagctcctgacacccagtccacagccgatcactacaccatattctcccaagactgtctgactctcctttgcaaaaagagacagacttttaaatcaggattgccctatgtcagagggcgtgttccctgaggttcggtgaggagtttggccctgtccagaaggctctgtaccaggtgcacaggagcagctgcatccagctggaacctcagagcaaatgagagtgcccacatcccagggggcatcagtcagcgggcatcccaggggcttctcttagcttcagaaaccctcccttgtgattcactaccaccctgggagacaaatggagcaagtgagtgcctctccatttaacagatgggaaaactgaggccctgagggattaagtgacttgctcagagtttcacagtcagacagaggcagagctgggcagcccctcagctctgtgcattttgtctacaagcaaggtgactttgggtttagtgtgttcatgtttcaacaagaatgtaagtttgggatcagacatatgttacccctgttggatagtagctttgcaatcagtctttgcaaaaaatatccagaacaaggctagaacaaggtggtacagaaacaaataacacgtgttacagttacatatgagcttggattacctcctttatagaaggaagtggagacatccttcatgcagagatttaggatctctcactagcactaaccctcttgcccccacctagtgtttattccaatcacccctgttgctttttatcaaatgaaagatacagatccacttttaagagtaaagaagagaggaagcacagtttattaattacccattggtatcccaaggacttgtgcttccattatctcattgttttattcattcattaatccaaacactcattcagcagggatttcttgggggcctaccttgtactgggctctgtggtcctgggagatgcagcagggaatagagtcacaggcttgcactcatagagagaaccttctagctggggagacagacaacaatgacaaaaacacatagcactaggaagggagccagtagaatttcaggtgaagagtaatgggagatgggaacctacacaaactggagagacccaggaaagcctcctgagaaggtcctttaagatgagctgtgaggccaaggaagagcaggccaggcgaaggcagaggggacagccttccagtgagtggaaacagcaaatgcaaaggcctcgaggcggggcagggcttgtgcttttggggagcagaaagaaggtcacggaaaaaaaacagcgtgattcatggagagaggcccagggctgaaaagggagaggcaggagtggggctcatggtctctagaaaacagactgggtttgagtttgtgtaatagcctggtgaggacggtattattatttctgcttccattttacagttacagaaacagagggcagcatatgatactggggggtactgggatagggctgtgttattgattgatgggggacctttgacggtcagaaatggagggaggctggtggtgtacccccttgacttcacctgaatgtcagggcaaggccaggagcatgcaggaggcttaaagattgggaacccctattcttgggccttctccccattctttctggagcaattggaagaggcccatgggagggaggtgactgtcatgatgtcccccactatgaactatgggaatggctggagggtcactgggcctggtgctccagctgcctgacctgcagggaagtggtacctgcaggacctacagtgagggagtgttgacaccctggctctgggaaggagctcatggaaagttgggtgaacttcttgttagactacgcaggctttcagaagtgcattccatacggagtggggtggcctccccagggaggagcagagggcagccactggaacaagctacagctacaaaagaccacctttatccctctcaagttctcccaggggcccctgtgtctgcctgtactagaggaagtttccaaaggattttcctttccccaggatgaagaatgaggccacactgccaaagcaagatctcgtgctatgtgtgattgaatctcctgctgggcgccaagcaggaatctcatcatttccccacaggccctgagagcacacaggcctcatccccaccccaccacagtgcagtgcactcactgcagagccaatgaggcctgagctcagggtctgcgtctgcctgcatctgcatggccacttccatctgtggtacttgttagtttattttaaatgtgcgatttgtttggttgcattttctccttctaaatatacagtagtttttgcatgtaattatgtattttttaagaagggctcccaaattgtgcaagcttcaggcctcacaaaactggattggcccctgccatctataaggaaaaaggcaactggtttgtgaagtgctggcctggctgctcctccccaggaaccaaccagatagggagtttcttaggtgaagctcagtggtctctggtcccgatccacaatgataaactggcctgcatccagccccacctttctccttcccagttgaatgcattttgttcaggcatctgttgtcatgcacacctcagaagaaactgactcctttccctggcccaggggagcatctggttggcctatgatcatttcactccccttattcataattggttaagggcagagtttctcaacctcagcacacatgtacattggcggctggataattctttgttgtggggctgttctgtgtattatagaatgtttcacagcatccctggcctctactcattaataccagttgcacctccccaaattgtgataatcaaagatttctccaggcatttccaaatgtcccctagagggcaaaatccccgccacaatgtatatgtgggttgggaactaccagtttagggtgaccctaattctggccaatgagacttgaaagaaactctgcagggcccttcctggagcatttcaaagattccccataattttccaatgatgcccaactccttgcagcagtgagcaaggctctgcgcagctggagggctggtctgtgtctcagctttgggctgttactcacgccgttcctgcttcctgaaatcctgaaattttccttcacctggtcggctctagtcctgccaggttcagaacccaaagcctctcctctgtgttattctggtgtcgtgcacatatgcttgtcactgcatttattacagtgactggaattattaattcactgtcctctgtcccctactagaacataagatccttgagggcaggagacacactcatgctgacatctctagtgtcgtctagtggctggaacatggtggagcctcaataaatgatatttgacctgtattaactttctgcccctcactttctcatttataaaaggtagtgcttgtacaaggtgacctttgtagaactctatgactccacagtcaggggccagttccacacaggatggcatcagtgacatctttttttttttttttttgagacagagtctctctctgttgcccaggctggagtgcagtagtgcaatcttggctcactgcaagctccgcctcccgagttcacgccattctcctgcctcagcctcctgaatagctgggactacaggtgcccgccaccatgcctggctaattttttttttttttatttttagtagagacggggtttcaccatgttagccaggatggtctcaatctcctgacctcgtgatcagcccacctcggcctcccaaagtgctgggattccaggcatgagccaccgtgcccagctggcatctttctgtgatgacatttctgtgagcaggcatctaggagaggatgagctccattttcccattttctattctccccacatccagaagacctgcgtgcggcctctagaaatcacattaaatctatcaattagaaataacaataatgttagaataatcttcatgttttagtcctgatagttcaaaaaagttaatctcttgcattcactcctggcttaatgccacagtcaaattagatttatgaatttagcatgattgcaagagaacagatagctgcatgttctgctgagccagtgcaaacctttaatgtttaattaagaagtggaattaggagttaagtatgccttgcttgggatattaaaaaaaaaataagaaatagccttaagtcttccaatcacagccaacttccagcctctccagcctgccaagattattctcaggggagataactttggagaatggtgcttcccagtactaaggtaatgctgtctttattttaacagtgaatgaagtaagctatacaagcaagctgaagcacttcaacatctgcccacagctcccatccattgcaagagatgtaattgtcattgtattcttttgctagggctgcagtagcaagtgctacatattgagtggattaaacaacagaaatgtactgccttatagttatagaggctagaagtttgagatcagggtgtcagtaggccacgctgccctataa[131 bp omitted]ccaccacgc[136 bp omitted]gcctaattttagtttttaattcttttgaagacaagttcttgctctgtcacccaggctggagcacagtggtgcaaacatggctcactgcagccttgacctccctggctcaagtgatcctcccacctcagcctcccaagtaggtgggtctataggcacatgccatcatgcccagatagtttttttttaaaaatcttgtagagatagggtcttgttctgttgcctaggctggaggacagtggcataatcatagcacactgtaaccttgaactcttaggctcaaatgatcctcctgcctcagcctcccaagtagttggaaatacaggtgcatgccaccagggccaggtaatttttttgttttttacagagacaggggtcttgctatgttgcccaggctggtctcaaactcctgggctcaagcaatcctcccacaatgagattaccactgtgccccgtctcccctttttagaaggacacagttacatcggattaggagcccacccttttcccgtagggcctcatcttgactctaccaattacatctgtaacaaccctatctacaaataaggtcatgaggtactgggagctaggacactccaacgtacgaatttagggggaggaatacgatttaacccaataacagtcagcttgatagaaaatcattagaatatccatacatttgcatatagattttgcttttagttctttacacaaatctagctagttgtttttggtacacttctgctaataattctccatactctttctgtttttgacttctaaggatcttccataaaaggctctaggctagaacctggtctacaaattatacaccctggcatgtccaaaagcaaaatgctgcctacatctcctgaaaatgcaggaatgtcagaaaagctgctgaagtggtggctaccaggagctccaggggcctagcacccactcccagcccgaccctggggtggggaggggggtgctcttcagagtggctcattttagagctgactacccaagtgcagaagaaacaacgttttaaatatatcgggcagcagagcagctagatattaaggttcttctttgcaggacatcatgaaatattgttcatgacgaccctgaccctgggttgggcgcgggtgctcttcagagtggctcattttagagctgacttcccaagtgcagaagaaacaactttttaaatacgtcgggtaacagagcagctagacattacggttcttctttgcagaacatcatgaaatattgatgttaagctaaaacgaatataataaatgtatgattgcctgctaaattggtcattatcttttttagattctggctttgacagaaagtagcaggccccaatggtttaagaaagaaaggaaaaaatttttttaattgaggaaatcatatccacgtctttttttttttaattgttgaaaagatgtccacagtcagatttcagaggaagaacaaattggtcccagtcaagagcaccgtcttgtgggaataccattgtgttctgtacggagctggaaaaatacataacagcaggatcctattgtgaaaccagatattatgcggaagtctaggcatgagacagatgtaagtggagctgtcatatcgaagcagaaatagcagccctctggattgtcttccccctccagcctttatcccagcaccatggcaagcccttgaagcaagaaagtcctgctaactgcatgactttggtctagtcctcacgttctggttccccctgggggggcttagtctttcactgagaggagagacgtgtacacacggatggaggtcagatttcccccctccccaaccctctctaaggcagcaggtgcgtttgttgctttccagataagtagaaaccaatccttcacccctggagtggtcctgagtgggctcctgatctaccatgccctgctcccacacccagcgtgaagatgaatggcttctctccaggccacctcgcgctcctccatccatcactgctgcatgtgtggccctcaacagccagaaggcttctgtctccacttcttcaatgactctcctgccttccccagccgtgctccagcagccccctctaacaccctgctcccacctgagctccaaattaccctgacagctagtccttgataggggatgattggggaccatgtttccaatcaaggagtgactagctgtgaaatcccagactccaaagtacttgctgtctcctggaaaacaaggaatgggcctagccaacctgatagggattgtttgaattctgagaggaaggaggccggcagacttggtccttttatttatttgaagagagtttgttgctccttggttttactgtaccccttctggtcatttatttcttagctgatcctctcaaacctctagatggcagagtccaccagccccattggtcaggtgggtagactaaggccttcagacagcactcaaacaagattctcggcagcgtctgatatggtgcccatatctctgcttagctatgtcaaaaaaggaccaggcaggaggttatgcggaagggcctgttctcagctgagtggctgctgctctcagtcacgggggaccgggacacgggggaccagggactcgctcacactttgctttgggaatcggcctcctgcatgagcgtgggccaaggctgtttccccacttgacgacagtgttcatcttgttcccacctcggaagtgggaggtcggaatcctcagctccagcaggaggaagagcctgggctggagtgggtttctgagttcttaacagctgcagcagggaattctacaatggctggaggagtaggcaacactgaagccaggcaggggtatgaaggtgcaagtaccggcacaggtagcagaaagatggccaaagagcacgctattcttgataaaatcacactgtattgggggctgcaaaaacctaggattcttcggatggagaacctataggaggagttcctatggagagcacccagggtactttgcgggtgagggtgtaagggctccccctgctggggtggagtggaacaccaactaatctcttgtcctgttcagtatgtaattctgtacaaagtatctggcaaagtcttggcccatagggtttacagccccagctgtgcttaatttctctctctccttctccccacctgaaaccccctcaggctggttgagatccatgggcaactctgctggtcctcagtgctcctgcagaagagagaagagagctctcttggcattcctgcaagcagcctcatgtaggaagagcccagctctggccttgcagtcagaatgactggcctgatgctgggatcacctcccaaacagctcctggaattggccttgtcctgccctactctccagtgtgcatgtgagagtttctgtctctgaatttccatcctgacttctgggaagcaggtctgaggtcagctcccatctgtgaattaggcttgggcagccagagtcccaagccatcaattgaattgggggtgaaaatggggacaggactggggtgataccagtagagttacatcagggaggggcaggggttgggaaaataaacctaaatgcagtctagccaagaacagtctagctgaggccatgaatgaccaagggaacctatgcgggctttggggttacacagacccaggtttaaatctcagtttttctattgactgtgtgtccttcgatgagtggcttagcatctctgggtctcagttttttcatgtacagcaaggacaagaggaatgctttcttcataggattgtgaaaaccgaatggaataacacttaaaacatctagaactgtacgaggcacatcataggtgcctgatgtgagttctttcttcaccttccctacattcttcagttcatgaacggagtggcgtcagtaccagggagttgtagcagagccctagggagttggaatctggagggagaggatcaggtggaagttgggttaccccttaggagagaggcaagaaggaagatccaaacaagagaagtaacagaggtggcaagctaccatgggctgctacccagggtgatgtttctcatgcgtcaggatagattcttccaacactgagtcctgctgtctccaccttattgcctaggaaggtccagcccctctctttccctgccacaatggttggaagtccctggtattgtggaagaggagaagatgggggctcttagaggaacctcccctccattcctattgtgccccagcccacgcagctctcatccccttcaatgtggctctgggtggcaggtgccaaaagatgaatccagacagttcatgggccatctcctctgcagccagagaataagagaggataattattcattggatgtagtttacggcatttagttgcaggtcctgtgctgagggatggtcacagcccaagcctctctaatgacctggagagcagagaaaaggatgctattattctgtttattgagaattaagataaatctggttagaggagaagccatccgctatttggctcttcccaaaagcaattacctataattttgctgcttcaggaaagaaagtcactagtatttgtgggaccgaaaccattacatgcaacctgagaaggcccagaggagattaatcatagcatttttctcagtgctgcatcaatctcacttcctctcaatttgggctcaatttacaggctactcagttccccacagatgcagggagaggggaatgtgtgtgttgggggtggcctgagggttaattggaacattttgcaaaccacctttatcaaagcagaggtagcctgctggcctcttagttcaaatggtttcatcctgtccagctgagaggtgtgttgggtctggagacttcgtgttggttttgtgtagttgtgtgtgtttagattaaagatcctaacttaatggggcaactgttctttactgccctgttgcggcccactggtgtgttaggatcaattgcaaggtgtgttacaagtaagtttttgctactaccagtaaaagtactgaagtttttgaataatttacctaagaaatagtttccgacagaatgaatgttaacttaacagtattagtacacccactcacctgtgatgtacttaatggagcaggagggaacaggctgccatcaaagctaactcctggaaatgacctagaacccacagcctgtctcagccgtgctgcatgttccagcagggaacaaagcgactgttgtattatgtaaaattacttacctgataataaaatgtttgtggattggataaatttgaacggatatattgtttccttcaccccacccccactagtggcaaaagctgctctgtatgaatctgagtacatttctgtgacagtattcctcatatgtacagcattctatgtgaatcatctcccaaaaattgccatggggtcattatccccagttcttaactagagaaactgagattctggaagtccctctgaatggcccatacttccccaggtgtctctgcaggaaacaatgtggacaatcacagtagttggaaggacaatgactgacctaatggagttcaggacgctatgactgttggcacctgatgtgcacagctgctcccatctgcgcagagagaatataaaggcagtggcgctgaaacatctgctgctttcactcaccatcaagatggaactgactgtacatgcaagcaaattttgatgaagagagtgatctcagagtgcgaagataagttgtttctccttgacacctaggaatgcacctggccaagaccctcagttgaaagacaatatcaaataaatgcaaaatctaaatatccatgtgcttgtttacttttcccccttagataatggactgtagccattgcatatttatttattggtttaccttttagtagagatgaagtctcactatgctgcccaggatggtctcaaactcctgggctcaagtgatcctcccacctcggcctcccaagtactgggattactggcacgggccacagcacccggactagcctcatggtatatttaaaagcatccctaacctctacacgctagatgccagtacacactagacaccacctccagtggtgtcaatcaaaaatgtctcagagacttagactcagtaatatgtatccctctttcctctatccttcagtcattcaatctccacttctacccctgccctggaggcaaccaatctgtaccaattttctgtgtatcttttctatagaaatattagattgagatgattccccctcaccccagacaatatgccatgtccagatccctgcagccagtatatattaccttatttggaaaaaaaagtgtctccacagatatacttaagttacaggttttgagatgatatttcatgatggattaccctggtgggccctaagtccagtgaccagtgtcctcttcagtgccagaagagaagacacagacacacagagcagaaggccatgtgatagaattggagtgaggtggccacaagccaaggaagctaagttgtgctgacaaccaccagaagctggaaaggcaaggaagatttctaccctggagcctccagagggcgtgcagccctgctgataccttgatttcagactccggtctccaaaactgagtccagaaacttttgttgtttctgttgctttaagtttcccagtttgtggtaacttgttatagcagctctaggaaactaactctctctgcaaatagaggtatatatattttttccacaaactcacaatgataaggcacattgttctgcaccttgcttttttaacttaaaattctattatagaaatctcttcatatcaatatagcttcatttatctattattgtgtaaaaagccactcaaaaacatagtgacttaaaacaataacaattatttgttagctcatggttctgcaaagtgggcaggactcaactaggctgggtcatctttgctccctatggcaccagttgaagctagaatttccaagtctgttttttcactgacatttctcagctgatgcctcagctaggatggctaggacagttgggggcttttggcatcttttgctcttcatgtggtttctccatgtggatgcatgggcttcttcatagtatgatggctgggttgtaagaagtgttcccaagagagaaagttccaatatgcaagctcttattaagcctccatttgcatcttgctctcaatgccaaaaactagtcacatacccaagcccagaaacaatgcgggaggggactatacaagggtttaagttttgagaggtatggtttgttgggggctgtcaaagtaagtctaccacaagtagacttgcatattttcatttcccaaaatttactttaggcatgtaatctagacagttactcttcattgttttttttttttttttttttttttgagacggagtcttgctctgtcacccagactggagttcagtggcgcaatcttggctcactgcaagctccacctcccagattcacgccattctcctgcctc[216 bp omitted]gcatttcattatctggatggactaatttattcagttcatatactaatggatatttatattacttccaaacttttgttgttaaaaatgatgctgcaaaaatattattttatgtatacatcattttgcacatctgtgagaatatcagtgtgctgaatacctagcaaaattgctggttaaaacagcatgtgcacgtataattttgatggaaattgattgactaattgccccacatagaggttgtaccaaattacattcctatcagcaatgcatgaaagcaactatttcccccacactccaatcatcctaggcatcaaacattttttgctttgccagtgtgataggaaaaacatagtatttatttttgttttcatttctatttctcttctgattgagatcaatcatgtttgcacatttgtaagaactatctatattttctttctatgagctgtagttatttcctttgcccatttttgaggattgttggtctttttcttgttaattttaaggagctacttatacattaaagtgattgtgcctttgaccataatataaattgaagatttttttttctgattttaaagcatgactttgttcatggtggggtttttgttctatgcagaaattggattctatgtaaccaaattactctcttctcccatggcttccacatattgttgtatttaggaaggttttccacattaacagattatatatgtgtgtgtatttatgtatatgcatgcatgtgtgtgtgtgtgtctgtgtatacatctacaactacgggtaacttaacaacagggatacattctgagaaacacatcgttgggtgattttgtcattgtgataacatcataaagtgcactaacatgaacccagatggtatagcccactgcacacctatgctatatggtaaagcccattgcttctagactacaaacctgtccagcatgttactgtactgtatattgcaggcaattgtaacaaaatctagaaataaaatcttatttctagaatacactgtattctatacaccatattctacacaccatactcaatacaccatattctatagttaggtaagcaaaacaagcaattaatatcaaacctgcaccccaaaaaatgttggtttgtatccttcctgtgctaatcaacccctcagttcctatcattatcctcttcaccctcttcacaggaactacaatcacagtatttatcttgcactgattacaagtctggatagggctggaagtaaatatactatacattattcctatcctatcctagttaaaaaagcaactccccacttcacagaacccactactaaatgattctttatacaagcagctgcatccatagtcctaacagtagctatgattattaacataaggtactctggacaataaacagttataaaagtcttgaaccaaacagtatacacaaataaagtttgtgtatctaaagctatctaaacatagaaaatgtaccgtgaaaatacagtataaaagattttttaaaccagtacacctgtatagggtacttaccatgaatcggagcttgcaggaccagaagttgctctgggtgagccactgagtgagtggtgagtgactatgaaggcctagggaattactgtatgccctaatgtatgactggcagtgcagtacgtttatttacaccagcatcactacaaacacatgaataatgtgttgcactatgatggtacaacagctatgacaccactaggcaatagaaaattttcagctccattataatctgatgggccatcctcatatattgtccattgttgacctaaatatcattatgagatgcctaattgtgtatgtatgtatatgtaaatcaatcgcatattttaaatctttatgtatttgtttttgcattaagttctttaatttgtctgaaattctttttggtgtaggttatgaggttattattttctggaggctcagttgcctcaatgtttatcacataatccactgtttatccactaattttaactggtatctttttcgtatactaaattctctcatgtatttggtttgatttgtaggcttgctattctgtcccaatgatctatctgtctattaatatccagtaacatatcttttaaaaatatcctaacattatatattctaaagttcagctcatcttgttttgtttcaaaaacaatctgttgttaattttatttagtactgcattaaatttgtagatgaacttagggagaatcctcttgatttttgaattttctttttggcccagtcttttccttggcctgagcttgattactcaaattaatctgtcaggtctaggcctgttgatgtcacacctctgataggaacatcctggggcaaattggcctggagctgtctgggtgcagcaggctaaactagagctcaggtgccttagggactggatggaggcagatgaaattgatactaggtatgtagtcaggggacaaagcaggatcatctcaagggtaccagaaggatctgggtagactattctgcggaccaggtctgaggagctcaaaggaatgttgagaaccaggagaataaagagaagaggggtgtcaaaggaaaggaagcgaacagactgtatgtctccctattgcagctcacttagaatctggggcgtactttgaggggctataaagagccatggaagacttggtataggtcaaggtcaaggtgaattctctctaggtgaaagggctgtgagtacacatgcctggtggagagtttgttttgagagatagaacagtgataggagagggctctagaatagatgtcagatcatttggattcttttagttctagtgtcacgaccaatttgttggaggatggtgggatcaatcatgtttgcacgtttttaagaaccatctgtattttcttcctatggactgtgtttatttcctttgaccatgctacttgcccacattacttgcttgctcatctataaaatcaggtggaggtggagtagctctaagattttttcccaatgcagtgtttcatggctctgtgattactttccagagtgtgagaaagattcatggcctcaggctatgggtaatattcccgagtcatctgaagtcccagccaaggccatggggtttaaaacgtttaaaacttcaacctggtgttggcacatttacagagtctgggaaacttgagttcttcatatgaaaatgcgttccatccaatggctcctccaccgtcaacagaataaagccctgatgtcttaccctgggacgggagcaccgtcatgatctagcctagcattctttttcagctgcaccacccatcctccctttcaggaattctgtgttccagtcaggctgaacttcttgtgatttcccacaagtgttaatactttcttgcctcagtgtttttattcatgttgtttccactacctgagctactcttcctcatctcatagccaaatccaagccacagttaagtgccaacctcagattttacctcttctctgatgctccctgttctagttgagatctgggggttataagtggaagagacccagtcaagctaactcaagcaaaaggaagtgtatcacaaagctccaatggataatgtcatatacagccagagagagaacagggggtgagatacatgtggagtgaaggaggactctaactgggacctggggatgctgtaatggatgctactgtctccatctctcagggtgagtgggattcccttcatctccagttacctctgtttttcctccatgcagcttttcctccaagcttgtcctccgtgtcttctcttctcctgtcctcttgttccccgtctcactcagcaaatagaatggctgccccacgctgcctacatgatttcctcagcacctactactgacggatgtgtcactttgtttaaattcttaacagaaggaatatggttggtaagtaatttttaaaggtagctattaacctaagaaaacagaaattgtatgggaaagaaaatatatcacaaaaaaagttttttgtttagtagcaaacagtatttataaagctattataatttaaacactgacttggtttaataaaaaattgaaatcaaatgatattgggagaataggagaggaggcagggagttggtagatatcaattaaatactcttctctcacaacagcaagttcatgtctaactctgaaaatccaggaagagtaacataaacaaatcatttaaaaatatggtggtacatccagaggcagctagaaaagttgaaagaggccactgctatggggttgtggggctggggagtggcagtaaatgtgcaggggattgatgtatttattatagggctttctgtagtttttttaaaaaattaaaaaatacatatgcatgcattacttttaaaattgctcttttaaaaattatgaaaaaatgtaaagaatttaacttttataaaaaagctttagttcttaatgagatgcactttcagaaatctggcaagctgaactatacagaaggtcccatttcctggggcttcccaagagtgctgctttcactggacaattaagcagatgaaaagttttgtttgtttttgtatcagacagattttacttacacataggcacacacacatgcacacaacataacctcacagataaagacatatgtcctccattccagtcccttaaactccatcccccaagcaattaggaacataaatttaatgtcattcttcctagtccacagtttttaatatttttactataatacatacacacatatgacacatctatacacatatctgttaaaaaatactaatttacttattatgttttgaaattttcatttaaatgttatcataatgtacgtattattctggtacttgctttactcatttaatatgttgagacctatctatattcacatatggatctagtgcattcattttatttcatcgtatgagtacagcagaatttattttgcctgccaacctttttactcttacaatcagtgtggcagtgaatatccttatacaaacctcatgccaacacatacaagaatgtcttctgcatgtatgcctagacacggaattgctgggttacaaggaggcacattttccttttactaggtcactgggtcagcatcgtttttaaacacaactaaatagcgctgttgtcagattctggctcctgggtgacaggcttgtacagactgacccagctgggggtggaggccgtatctgaaataccatctgtgtcgctgtcacaacagtgctggaggctctcttttcagaggcagcagtttaggaccggagcaaagagacacatttattcatgttctttctaacaagctggtgtttgacacttaaagggctgataaggttcttttcttttttacatatatgaggggaaagcactaggtaacatacaacaaagaagaccgagggaggatgagcaaagtagagttatagaacacatgacatgaacgaagaaggcccccatgggtgggaggtgggtctatacatttttccgttcgttcattatcagtacagttgactcttgaacaatgcagagttggggtgccaacctccatgtagttgaaaatccatgtcccccaaatttaactaacagcctactgctggccagaagccaaactgataacacacagagtcattgaatatgtattttttatgttacatgtattgtatactgtattcttacaataaagtaagctagaggagaaaaatcttattaagcaaatcctaaggaagagaaaatatatttaccattcattaagtggaagtggattgatataatttggatgtgtgtcccttcccaaatctcatattgaaatgtaatccctaatattggacgtggggcctggcaggaggtgattggatcatgaggacagattcacatgaatggttttgcaccattcctcttgatactgtcctcacaatagtgagttctcctgagatctggtcatttaaaagtgtgtggttcctccctccctccctactcctactcctgctctggccatgtgatgtacctgcaccccctttgccttccaccattattgtatgtttcctgaggcctccccagatgctgagcagatgccagcatcacacttcctgtacagcctgcagaatgataaacgaattaaacctcttttctctataaattacccagtctcaggtatctctttatagcaatgtgagaacagactaatacatggatcatcataaagatcttcagctcatcatcttcactttgagtaggctaaggaggaggaggaagcaggttggtcttgctgtctcagggttgacagaggcaggagaaaatccacatagaagttgactcttgcagttcaaactcatgttgttcaagggtcacctgtatttgtgaagaatgtgtcagacttggaactagactctggggcagaaagtaccataagaaagggacggttcccttttgactgatatggttgatgagatttggaaagcctacttcattcacattcctttccaaagaaacagcccctggccataggctaccacctttctcccaaccatggcagtaactgccctcatttctcactcttgaaaactgagtcagctgtttagaccagagagagtcccttgactaaggactgctgctcttaaagccacccaatgacctatgattcacacaccacatcaagaagatgagtggcaccaactatatgtatatagtgatatatcttcatatgatatagcaataccatgaaaagaactctgactgtcagtgacaagagactggggcccagagtgtattaataaactgaggagaacttttgcagtgagtgtcttgaaagggcttgattattttggttgtactgcacgttgtagatagatgcacatagtaggtgttcaattaagatttgttgattaagaccggttgagtagtgttcaatgcttatttagatgtgatgttggaaagtgaattttattaattacaaaattagaactactttatattcacataattctttgttttcagagggattttatatacattgttcattttaattttcacgaggagttataataccagcatgctatttagatatagttattattatataggtggttttcattaggaatgaatccctatagtgtagcggttaagtgtggatacaattgccaatcttgctttccatcccagttctacttcatatggggtttacgcatctcggtacttaagattcttcatctgcacaatggggagaaaagcagcatctacttcatcgtgttgtcatgaactgaattcatgaattcatgtgtgtgaaatgcttagaacagtgtctggcacataggaagttttcaaacgttattattagctgtcattttttttgttgttgaccaaggtggaagctgagattcaagaggatcagtttcatcccaggccaccctgccagtaagtgaccccatgaaaattagaaagctatcagtaaaagcaaaggagagaaagtgtgagacataagttttggttcccactgcaaaacatcactggtaactaaattggggtgaataagtacttgccagcctgccacatggggtgttgatgaggtttcaacaaactgatggatgtgcaaagtctttgaaaactgaagtacaatggtgtggctgcattgttctgctggggaggaaagggcacgaggctgcggtatggtgaggctgaatggggtctatggcttgggagaaagaaaggaaagatggagacccgcagctcatttcctgggagcatggataggcaacagtttggattcattacagagcccccaagcaggtggtgagaaaacgcagatgccccccctctgctttttgagcatctcatgttattcaacattgtccatatatttgtgcaaaatgctgtctcctcattgggagacttcaccggctccctgtgctactggcaggagaataggagtttcctaaaggggtctgttcagaaatgaaactcataaatgtattcctggtagagaaggaacaactggtttcttagccaactgagttttcctgaaatcacctccaaggacaagctctgagcctgtaacactggttctctcctcacaaggactccatgagtcatgtggagaagacatgtttaattctgtccagcaggtgaacaaatgggccaagagaagagaattgatgcacccagaatcacgtggcccatccttagcgtggagcttctggctcctgctgacactgctcccagccacacatggggtgcctgctgaacagagcccctcatgtctccttccccactactaactgtcacgggatgccagtctgaggcaccaaagtcggaggaacaaccacagtccaggacgactttgggaatccattagtgtgggatttgatgcatttcctaggaaagcaaacaatctctgcatgactttcgcagccacatgtccatagaatagcaacataatatttataatctcttatctgttccttttctacctttctccttgtggacaatggttacagctcatctacatgtctccctctctcccaaattcagcagcagagacatcacagatttctggttgggaaaccatggtctacaccacagatacagtaccctcaacaaggctgtaaagaagggggttgttggttaagaacatgggcttagtggcaagacagaattaggtgtgaatacaattttgttatttcttagcatacatttattgtttccaaatttcagtgttcttctctgtaaaacagagataataatagtgcccatgtcatgaacttacagcatgagaggagtacatataaactgactacaggactttcgtttttagcaagttagccaattacatagacttctggataaagtatcgtaaatatatttttaatagtgtatctatgcttaatggaaaaaaaaaccctgaaaaccagaaggttaagaaagacctaatattttggctaccctgagacaaggatgcattttctcaactagcttgaatttttagcagccacttggatatagaatatgagtccttaagctcacattaggcaaagaattggaactgagatcccagactaagctgggatcctcaaagggttggaacccttggtaaatggttagaatagaaataaatcttcctgccgactcagggaaatagcaagaaactttgctttcctctggactctggggaggtgaaaaaaaaaagttttctgttgatagtttgtaaccatgaccttgacctctcttggatttggtatttacctttattatatctgttcaggaaattaacacaaagagatccctagctggaatacccctagagcttccagcaaagcaaaatcaaattctgtcctgccaaatacaagctccattacaaaatacatgaagaagcaagacactgtaattgaggcagcagacagcatccatggaaagacaagagcccccagtgcttcagagaacagaattatcagaatggagaaataagttccatttgaaacaagtaaagacagatgcgaaaagggtaagatactactaataaagcattcacagggaagctggcacgtagtaagcaagtaatagatgttagctattattcatattagtgttagggttctgttttcatggaggaagggaaaacaaatctgaaattcaatccatgcgttgatcactagttcccttcagacacagcgctttgcaggctgaggagcatatgaccagaaccggagagatgggagggtccatggatgaaggtctggaggtaaagtctccttggtcccatcctgactactccccaaatgaccatgagaaaatccatcgcttttgcaagaatcacaaatctgacctcctaaagctgaagtacagagtagaattgggggagcattctaaggcttgctgtaaaattaatcaccacacaataataattttaaaaagccgttgccagagggagaaaggcataaagtcactgaggtcacagtatcaagctatcattttgatgtacagttcccaaagagatcagtctactctgacttagaacacattatttttgataaaattgcaacctgtcagggatagcaaagaacccggattcttcagattaaaaacctaggatgcagatggacagcctagggtactctgagaagtatgttgtgtgtggtgggcggagggggcatatgaggactgtccttgctggagtggaatggaataccgaccaatctcttgttcgtctgttcaatatttaattctgcacaaagtatatgattggccaagccttggatcatatcatttacagccataccggactacaatcagtaaataaatagcttgctgaaaatcaataaataaggaaataattgtcttctataggattcaaaatgaagaaagaccatcatttttgttatagttctcagcccaattcactcttacacaagggacaggaagtaggtctgagtctatctccagcaataggctgaattccaaagggtgttggtcccagggtctgtcctggtttgaaatgagttcaaggtagggtttgagcaccttgacacagtacagactccctccaagtcagggtcagccattggcattctatgctgagacagcctttgcagtgctaccttggataattcattcttacccacttgatcattagagatcaagtcatgaggtatttgcaagtcacttaatcggccagaaagccttcggattaagatggcaatcaggcttctcccatcaatgtctttttgcaaagaatagtccagcctgcctctgcacatcagtctgtattagtctaaggatcattctaagatgtatgtatttcattgtcggtacttctgatccgatggacaatttgtctaagtgagttctgcagacatagaagttctgcagacatagaagctggtggcgttgagctcggctgtgccagctgggtggggaaggtctcactttggcatggtggataacagggctcattctggaaggtggtaacttcttcctttcattcctcttcaatgtgacgtcacagacaatgtcctggtttagggatcaggatgatgtgagtttgtgtcttggctttgaagcatactcgctttggtacttacctcagttccttcatctgtaaaatggtgatacctctcccaattgttgtaaggatcaagtaacttagcacaatgctaggcatatagtaggtactcagtcgtagttagtttctttctccttcctggggttagagggggggtatcactgattgaaccaagaaacatacctagagataaggttttaaggcaggaggaggcttcctgtggaggaagaaaggatgaaaacgtgaaatctcttaatcctcagctaggatagttcactacaacttgaaatctgggcaacccaattctctctgagtttccatcaagggagcagagccagcgtcacacctttaacttctatgacagccaacacacaccattacactttaacttgtgtccaaaaggaaaaaaggccttgccccgagggaggaattagggagatccctatgagcaaggtgacctacacaatgacagcccagggacatcaaaaatccagcagggttgcgaactggggagttgggacacagaacaaatgtcttgataactgcaatctacttcttataaatatcacaataatcgcatttgttcaactactcaatcaatgaggttagctatataagtgtcatatgttgcctcccctggaagtgaatctaggagatttaatgattcattcactcaacaaatatttattgagcatcctctgtatgccaggcgatgtaccaggaactaggggcattaggttcctgctttcatgaagcagagagactaaacaaacaatatcagatagtgctaagttccatggagaaaataaacagagttacggattgtgcccagggtaagggaagagttcattttaatagtggcctggaaaggccactgggatggttactttaagaggggatatgaagagtacaaaggaggcaagcatgaaaaaaatctggagaaaaatattccaggcagatgggatagcaagtgcaaagttcctttggtttgtttgaagaatggaaagaacctcaggatacatggacgcctagaacagagtgagcaagggggcaaatgctgagttgaggctggagagatgggagctatagtttgtatcatggccaaatatttggattttaattaattaaaatagagactctttggtagtttggtttctttttctttttttttttgttgctgttgttgttgttgttgttgttgttgttgagacaaggtctggctctgtcacccaggacggagtgcagtgcagtggcatgatctctgcttactgcaacctctgcctcctgggctcaagtgatcctcccacctcagctttccgaatagctgggactacaggcacaagccaccatgcccgactaatttctgtagtttttgtagagatggggttttaccatgttgcccaggctgctctcaaactcctgagctcaagcaatccacccactttggcctcccaaagtactgggattacaggtgtcagccaccgtgcccagcatatgttatataatactaatatataatctctttggtaggttttaagcaggggaaggtacattcaggggagagaacctggggcctttagcctgtccatgccctcaattctgtaagctcccctgttctgctcccagactcagcatgcctctaggtgtacatgattgttagactgccctcctgtcctcccccttagctaggtgggccaggccagagctcctaagctctgacctttagccctcaactccatctgtccttctggcctcaggctttggctttcacaatcctatgcatcattcagacctaggttttagtacctccaactttcccactcgcttttctatttttattctgagctcaggtcactgttctctccctacttcctgaactttgcctgtgcctggactccttaaatcatagagaaactgaggcaggataggtagtcaagaaagtgaccatgttcttgggacccagcaaccacggtgaccatacagtcaacacaataagcctcagcattagcattgtaattggactttctcctgaagagagcatgcacgttttgattttacctgtcctcaaactgatgctttgctcgttatcatgtaaaaaacacaaccctgggtggagattcaagatgctaatgagatattggtataggaacaagcatgtatagctactgcacgtgtgcactcagagagccatccagaatatgcttacctgtaggcacctctttccacctccttatgaataatcatgcatgactcctgtaaagggagtctccctagtgccagtctttgctgtctcatccttgccagtagcccaccctgaattctgtctctctcaaggtgtactgtctagtctgcacctaacttataaaatatattttttcttttgcaataaattactctatgtcgcacttcttttgctgtgtgtctcttatttaaattcttttaaactaacaggataagaaccaaggtatcacaacagctgtcaacaaaacaaggggcagaagttcatggaccaaagactaggatcaggagtcacattctgcctctgctgccttggggatcattacttcacccctgtggtcctctctggagcttctaaactgtactgtgttgggattggatgtaatggtcattaaggtccttttcaacttggatgctctaacctggggttcagccaattcaagaaaaataggaaaaaactaacaggtacgaagtagatatactatatatttgagagaaaatgactccctatattgggtttaaaagcactctttggttttgaaaccccacaaaacctctctccagcccctgagctcttggcttcctgtaggcgtatgtttgtaacacacatatgtcttccagggaacaacatgaatgtcagtgtcatttaactggagacttgcctggtgtttgtatttgaaatgaaagtcttggaactagttagcctcaaatgtagattagccaaagcatgaaatttttcttcctgcctcttttttctcacaaattagcattttacatgagtaatgtatgttcattattcaagaacactatggagttagataatatagaattgaaagtctcccagaattttctattgattaccacagtaaaaaattggtacatattctttcctttaattaatcaactaactaatttatcgtatgtaaatgtactaaacatttttttaaatgtttgtggttggcttagcagtagcccccaaagatatatccacatctcaatctcaaggtaagaatgttaccttatttggaaaaagaatctttgcatatgtgacaaaattaagaattttaagttgaagagatgattctgaattattcaggtgggccctaaatgtaatcacacatatcattataagaggaaggcagacagagattttaacagagagaaggccatacgatgatggagtggagagaaatttgaagatgctggccttgaagattagaatgatgtggtcacaagcccaggaatgccagcagctaccagaggctggaaaaggcaagaaatgggttctcccttagaacctctatggggagaacagccctgccaacaccttggttttggctcattgaaatctatttctgactgacttccagaactgtagaataaatttctgttgttttaagccacgaagtctgtggtaattggtcatagcagccacagaaaactggtacgatgttcaaggcctaaaatggaaaactgcagtccacttcactcattttcaagcccctagttttgtttcccagaggcaaatattttaaatcttggagcagttacttctggaaattttcttgatatttcctgttgaagtgcatgtatacgttatatgtgtgcccactgactttgtatttttgttttaaaaatgtttagaaactcttatacctcctaaacatatacatatatatgcacatgtatgcatatatacacccttctcttcatcacactctcaacttccaagataattataatacaacttttggttgaatctgtagtcatatgtgtgtgtgtgtgtatgactatacatatatgattcatatatatatatatatatatatatatgtatatttttgagacaggatctggctctgtcgcttaggctggagtacagtggcacattctcagctcacattcttcacctcccaggctcaagccatcctcccacctcagcctccccagtagctgggactgcaggtatgtgccaccatgaatggctaattttttttttttaattttgtagagacaaggtttcacgacgttttccaggctggtctcaaattcctgagctcaagcaatccacccaccttcacctcccaaagtgctgggattacaagtatcagccaccgtgcccagcctgtagtcatatttttgtgtcatttattacaatgatataaattgtaccatagcagttctgtgtggtgtactatgtttatattttctttcttgaacaaccttttgttttttctggagttagtaattgcctcaagtttttctttgcccactccctttatgtgcatatcaccataattccatcctcaaactctctgccagaaatagaaaatctctctcaatatattcaagcacatgaaataatctgtgattttcattctgcccccacctgggaaacatctttcctagatctcctcatcttcttggttcaataagaagtggttgctttttagtatttgtaactgtgctgtcattctgaaatcctaactgttggagtgtcagctttgcatatcttctgtctctctttcttcgttgtgcctcattaaaatgaagattcaaaattcaagtagcttctgaagaaagggtgaatgctgtgaaaattctttgatttattgcatatctttatcttgactatgcatagaaatctaggaaactgattttacctcagagttttgaagacattttcttactgtctcctagcttctgatagtgctattgataattttaatgcttttgttatttctgatctcatgtatgtgatcttcctctgagagtttttgggattttaattttaccccattactctgatattttataatattttattcattgtgctgggcataaagtaagcttttaaaatctgaaaacctataacctttaattatggcaaattttctcattctagctcttgtataattttctcaattctaatttcttcatttcctggaactttcctcagttacattttgaaccttctgactaattttttaacacacttatcttttccttactcttttccattactttgtctttttattctactatctagatttcttttcaaatacatatacagataaatttgtccattctatcaaactttgtattttggctttcataattttaatctctaggagaaattttatttgttatttttgaagctccttttaaaaatcatgtaattcttgtttcatggattcgatattttttacctctgtgagaatgtaaattggagagtttccccgcatagttttcccttctctgagttctgcatcgtatttattttctctaggctcctttactctgtttatctgcctttcagttagaggtgttactcaactgttttaatatctggtatcttttcgcatttaaaagtgaagcattgcagagataagcagcttcatgggcatgcacctgacttccattaggatgctcctgcaggcatggagccatttttttaaaggacgatcaactgacactatctgtaagactcttctctctgttgggtcagcttgactaccctccaatcttctgtaaagggctagaggacttctattcctaattcccagttttcagcacagtaatctgcacctcccactctgcccaagctgtgcagggtattcttgagttataagttcctctgggtcaacttcttcagagagcaaacctccagtctcctgctagataggggagggagagctgtctggttgcctaaggtaaagaagggaatgtgggggtctaattatttcttttatggagtttcaaccaattctttacttttaagctccatccacaccttaatttttgaagacatctattgccttaaattctaaagtgtttacagagttccagaatggaaattggttggcttcttgttttacccacccagcaaccttatgggcattttattttggctttctttgctatgcaaagttaaattttagttatccatctgtcttctaacatccaaagttatcttgatatttctctgttttttttccttcttgatcttcgtcttcataagcgcatgcttttaacaaaatctttttacattcattttagtgggatcttggagcagaacaggataaaacacctaagttctattgaccacattttacaagagcctgtctccttctttcttctcttccagctctgaagccaagatctcctcctctgaatttgtggctgcaaaacttctttccaagtgcaggtatgtggctactacctctgttctctatgggatgaggtttctctgctccatgtccagtagggaaaagaggagcctcatccagccccagcgtaccccactccaacgtcaccactctgcaccaaccatctcctcccctttcctctcccaaatcacaatctccttggctatcttggtcatagagactcctctcctccttctcttcaagatctcaatgatcctttacccaactctgactcccttcctcgcacaagcaggagccctgtttcaaaaatttctggttggacttattgccaatcacaccttaattttaatgtctgatgttttatttttggcttgctgccttgagcctcagtcagttttctaaaatgaggaaaagaaggtataattaccaactattctgggtcaagatatatcctgccatcaacagaacctttaagccgtctgcctgttttttgaacaacacattcaatactctgtaaaaggtaaaccctacatctttctgggtctccatggaatccatcctgaacttgccttaagtcataactctgtaacgccgtaatctttccagcatctatttcaactgcctgtttccctcatttccagtttttcctcatagtcttcttgaaattaaagacaaagtgttatatgcctcctgcagtgggctcaataatgccctcctcccacagaagatatccatgtctgaatccccagaaactgtgaatgttaccttatatggcagaaggaacttttcagatgtgttaaaaatctttagatggagagataatctcggattattcattcagatgaacctaatgtactcacaggtggcctttctaagaagaggtcagagagttggctcatgctctttctgccacatgagattacagtgaaagtcagcagactgcaacccagaacagggccctcactcatgtggcactgtgatctcaggcttccagcctccagactgagaagtaaatttctgttgtgtagaaggtaccaatctatggtaccttgttgcagcagctagaactgactaggacagttgtgttcatgtcttgattcctggcccaaacaatttcttaaaataaaagatgatcagttaagggatttaatttgcagtagcttttgcattgggggaaatggataatataatgggtataaagaacccttaatatgcagagagacagaacaagttcaagccacttactttgtgcttttaaacaaaccacttaacatttttaagcacctattcctttatctgtaccatgttgattctctatttggacatttccagtgacatggatgctcaagtctttatgggcaacccttattatcacggcagtatttatacccccttctttctttttgcattgaccttgttatctttgttccacttccctaacatctgtctccacacatgccatgaattaattatctctgcctccaagctccataggttgatggagcagaaaggagatgagatttctcctcatgggtctgcatggatcctgagatctgatgtctgcaccaatgtccatccctctctaaccacattatgtcactgccaacggcaagccatgtggcaagagagacacaactgcctagtctgtttccctagaaagcacaattcccaccacaggtaaagaagctccatttatccattcatccatctagtcactcttttattcaacaaatagttactgaccatctattatgcgtcaagcagtcagttagatcccacacacacaaagaaaaataagacaaaagccaatctttgaagtgccgcagggagctgactggataatggaggaaacaggtccggaaatccacaaccactctgtaggagctatgatcaacagaagtgtgcctaggttgtggcacctgtggacgtgggtcaggtctgcaatctggtgaggtcatgggaggcttcccagaggagataatgccagagttttcaagaatgagaagaaataaggctcataaatttacttttactttgtttctggactttctgattcttttaatagggaatggtaaaatacgattggtgaagaggcccttaaagattatataaactaatcatctgattttacaaatatgaaaactgagggagaagaaaggttgtggtgtatccaagcatattggtagggaagcttgaggaaatcgtactagagcagtttgggtccttgtggcaggagttatcatgttataaggctttttcccgggtcactgaatttacctagaggttagttgaagcctgcaggccctgggttataaataagatgacgctattttgttaaaaagcagtagtttgagtgggggcacagtgctggctttttatttttaattttaatttttttgagacagggtcttgctctgttatccaggctgtctgtcatacagggacatgatcatggctcactgcagcctccaactcctggtctcaagcgatcctcccacctcagcctcccaaagtgctgagattacaggtgtgagccaacacagtacagtgctggtttgaacccttagagtggcgttgtgtttgggtaacacaatttgaaggtgcagcggggcacctgtgcctctgctgcactgcagcccagcctggagcccattctttcttcaggaacacctggcaaagcaaggtgttccaacccgtgttggtctgtgatgtgctgttcaacctgctgaaatgtcccttttctctcccagtactcatcatggatacgtgagcttctcctgaactccctctcccaccaatcttgatgcatttgccacagttatacccacctgggtgagagtcaaggagcctcatcctcctccatatgcggtcaaagggtggcggggctgggagcaatgaatctcatttttgttttccctgggtctggtcagtctgtgcttgtattactctgttctcacactgctataaagaaccacctgaaactgagtaatttataaagaaaagaggtttaattgactcacagttctacatggctcagggggcctcaggaaatttacaatcgtggcggaaggtgaagggaaagcaagcacgtcttatcacggaaaagctgaagagagagagagtgaagggggaaatgccacttttaaaccatcagatcttatgagaactcactcactgtcaagagaacagcaagggggaaatctgcccccaaaatccaatcacctcccaccaggccccttccctgataggctggaattacaattcaacatgagatttgggtggggacacaaaatcaaatcatatcagtcctctttgtgtgagaaccttctgtaagtttcatcttcagaaccaggaaattagtctctgacttttctaaaaccccaaggtccctggggtgataaatgacagctaatttcataaatgaggcctcctgactcaatccaatcatcatcccccttttctccatacctcccatgatgtaacagtagatggagaaaggaattcccaagagtgaatataggaaaacctttggagaagttactgagtctaaaacagtctgtaaggagctaatccctgtcttctttcaggggagtttcactgaaccacttgacctccagggatgactgcctacagtctcagtttggagcagctgccttctgtgcaggcaatgggaatgggcacataatgtagaggcttgatgtttgcaagacgctgtagcttttctaagtcactgttctggccccacagcacacaacacacactgagccacaagagggctccagcacaggctccctgtaatctttgttcccaagcatctgctttgacctactgtttgcatctgttagttatttattgctgcataacaatttgccccccaaaacttgatggcttaaagcaaaggatgtactatttcacagtttctgtgggtaaagaattcgggcctgatttagcaggtcttctgcctctggggtctcccatgttgcaaccaaggtgatggctggaactgtagtcatctcaaggctcaactgcatgtgagggtggagctttgcttccaagctta[131 bp omitted]gcctc[224 bp omitted]cttcttcagttccttgccatagtatgatataatgctatcagctatcagagcaagtgaagggcaagaaagagccagccagatggaattcggtttttatgacctgatcttggaaatgacacactgtcatgcttgcgctatttattaggaacaggtcactaggaccagcccacataagaggagaggagattacataagttgtgaataccaggaggctggtttctgggggccatcttggaaggctgctgtattaatttcctagggtttgccatatgacaaactgggtggcttaaaacaacagaaatgtattctctcacagttctggaggctaaaagtccaaaactgaagtttcaacaggatcaccctctttctgaaggctagaggggagggtccttctttgcctcttcctaacatctggtggttgcagcaatctttggtaatctgtgcagctgcacaagttcaatctcttctccatcatcatgtggtattctctctgtacgtctccgtcctcacatggtattctcctctttgtgagtgtgtgtctctttgtccaaatgtccctctccttgtaaggacaccaatcatattgaattcaggacccactctaattcagtatgattttatcttaacttgattacatctgcagaccccatttctaaatagtcacattcacagtttccaggtagacgtgaatttgagggcaatgctattcaacgcagtatagctgcagactggtgccccttggcaaatcagtgcaggtttaggatcatcctaacccaatgctgatccagggatttttaatagcaaagtagttaatgcatttgtctcctgtaatcccctgggatctggacaatatttctgttgataacaaggctttgagggatttagcagctaaggcaaagacatcaaagcaaactagttatgtctttttgatcttaaagtcaattattttcagtcccctttctctttcaatacacctgaacctgtgacacatttccttacaagattgtgtctcactaaagtagagcttctcaagtggggggtgggcatggcttcttggtggggagaagtggctggtatcaaagtaaataaaaatttctggatgggtgcatgttgtttgaatataactcttacattgactgcttcaccccactccccatgaggtgatatttggtaatatgtaaaacaatttaaaatgaacaccctcactaaaccatcaattcacagcaatttcacccgtacatatacagtacacttaaggtactcaatcagtcctagagaaacttacataaaagcatgcaatgaagcatgtaaaagaacgttcattgcaacattcattgtgtgtaatgacaaaatttggaagcaacacaaatatccttcagtagtggaatggctaactaaatggtggtatgttcctaaaatggaatattatacagcaattaaacagactagatctctatgaatgcataaaaatagatcttgaaaaccatgctgagtgaaaaaaagcaaattgcaaaacactacatactgaatggtgccatttgtgttaaataaaaacacaccaaacaatactatattatgtttatggacatgtatatgtggcagtaaaagtttaaaaaccatgaacaggaaggaaatcacccaagttcatggatctcgattgcctttaggctttggagggagaacaatgagactgaaggggagaacaaggaggatttcgactttgcctgtttctcttactcatatctttttagaaacctaaaacaaaacaaccaaatgttgttgtttcactggtatttgttatattacgtgattctgtgacctttttttttttttttttttgatttttgagacagggtctcactctgtagctcaggttggagagcagtggcacaatcatagttcactgctgtagccttgaatttctggcctccagcaatcctcccacctcagcctcctgagcagctgggactacaggctcatgccaccatgccaggctaatttattattattattattattattattattttgagtcagggttctctctctgtcactttgtctgaagtgcagtggcaggatcacagctcactacaacctcaaagtcctcggctcaagtgatcctcttgcctcagcctcctgagtaaccaggactataggaagatgctgctgcacttgactaattttaaattttttttaatagagacagggtctcactgcgttgcccaggctggtctccaacttctggcctcaagcgatcctcgcacctcagcctcacaaaatgctaggattacaagcatcagccactgtgcatagcccatttttaaacttttaaaaataagaaagtagaatggaaataaggccctgatttgtaatgactaaattcccatgggaacgtggcttgctggagttgtaaatcaccacttgtgtgcccatgggcaggattaggatgccctggccgctgagacaagcacaaagaggatggacagagctgtgtggagcaaagcacacatcctagttttaattgagttgtagaatcccccagatattcattgttagaccactcactaaatttctactgtggcattgtaatggcagaacatccttagatctggagcaagagggaaggagtggcctgaattcctgatatctttctcattctggtttacatgaaggctgtccgaatctcagtcactgtttttggatttctgtgagatgtcactatccccttccaatggcatcttttccatctctttcagcaatcagttctaggggataacatctccctgtagtcaaaatggccatgtccaaaataagatcatgtccctagaggtcagtgtcaggagaagagccaaaccacattgataaaattgtagagacgtcatgtagatacagagagaaagtggcgtggagggcctagaattcaacatgctccacctgaactcacaaactcctctaatcacaccgccaacagcttgatcgcttaatccagaaatcccagaatcatgattaacatctcctcctccattgccacatagagttaatcaattgatcactaaatgctacccaatctcccttctcaacacctatcaaagccacccatttgtcttcatctctcttgctctcctcacagtccaggaatccaagcctagacaacttatttagcctgcaggaacagccttctaactggttcatcctgacaccccactgttttcaatgtcatctccataatagccagagtgatctttcacaaacaaatctgatcatgtccctccattccttaaaaccttcaatgatttctttggatcttacggataaagactcaaatcttcagtggcttatgatgtcctccctgatgatccttgactacctcttcacctctatcactgtgttccattcacactgtaactgatacacctctttggaagggcctgcaatggagaggacatcttgctaagcacttgatcctgcactctgaggctaggcactgagagttgggctcaaagtgggagctatttccaaactcaggctttaattacttatcgttggacttgaaatggacttactgtcatcaactctccgtctttgccacccttcaagatccagctcaaatgccatctcctaaagaggcctcccatgactgcatctcctgccctcgacacacacactcagaattgttctctatatgtctgtttgaatatcattttatagattcttctcctcatgccatctgtctgtcatgactgcatctcctgccctcaacacacactcagaatgattatctatatgtctgtgtttgaatatcattgtatggattcttctcctcaagctatctgtctatctttccttctgcaactatgagggcaggaatgatgcctcgctctgactctctaacctaacaaggcacttcaatatagcatgtgctcaataaagatgaatggagtttaatagcattgatgggctggaaatagatgcagtgtgtgaaggaatgaaggcttattaaagatgctgggctctccaactttctaaagaagatctgtggctcacctttaaattcctctaaacttaacaacctctgccagctatttccctggaatcatttggacagacgcactactaatgatgatttaaagtgagactttgatgtcagcacctcattcacacttcaaaaaatatgtattcagaggcacacaaaaagggtgtaattaccatttcaggaaaatatgttaatttgatgcaatgcattactgctctgacagctttcagcttttgcacaaaatggttgtaaaatggatattactggaaaaaaatagttttcttcccgctcaaaatataggtagagagcaaaggcaaatagagtgagggccctctgtggagttgggcaaggggaacaaactgttagcacatggtctgactattagctggcaagggtgcaggtgctgataacatttctggtgtggaggtgcctgtctgggcctcctcactcaccaagagtgtcaaaaatcctatttaaagtgggagcgatgggaggtcataatgctggctctactctggaaagacccaactgtccggtccaggctggagctggggttctctgtttggattcctggggctgccatgacgcctggcttcctctgacagagagctccctttatggacgcatgagatgttgcttccaacccctgctaagagagaagagccaccccctgcccaagccccagtgagctgcccaacagtcctctctgagctgagagggcattggatctccctgtaactcaggggcctcctctctaggatgtgggtaatttctcctacctcgaagggatggcgtgagagttaaatgagggcaatggatataaaagctgagcttagtacagatacttaataaatggtagatcttcttacagttattattacattatcattttattatcgtagggagtaagctgattaaaaataattatcaaaaggagtgttgaagtgacccagaccttaagaaacccagagtgtgaagctgtttctaccatttcagaaggggtttctacagctgtccctcagcatgtaccagggattgtttccaggacacccctctccctgtgccaaaatctgcgaatgctcaagtcccttatataaaatggtataggattcgcacataacctacacacatgctcctgtatgctttaaatcatctctagtttacttagccctaatacaatgtaaatgctatgtaaatggttgttagactgtaatttaagcattttttattgttgtattttttccgaatatttctgatccaaggttagttgaatcgacaggtatattaagatgagctagttgaacccgtggatacagaggctgactggatttacagaaagggtgttttacatatgcacctgtctaggccaataggtggagagtggaaggggccagagagaactcaagagaggcgatggctctccctcatctgccaggtgtctcggtgatctgaaagtgtgagaagatgcccttgtagtaggtcctgcctcccacaccccaacaatttcaggatgtgtgcaaattcctgctccactcccacatggtgcagagatggaggacaggggtgacttagattaaatcaactagaaatgtccttgcgagcagacacctgtttttgctcccaccttcctaacatgcctccgcagagagaaggggcaaagaaagccttgggactcctgttctatccccaaagaggtgggaggtgggggaggaggaaacagtgggagaacactggtgtctgctaggcaaatgcgacactcagggctcagttcccctctcttttcctgccttgtggaagcatatactggggaagtcagctagcagcttgcaggtggtaagaggggtcagtgacagccagaagcagggatgcccaggcatgctaccagcagcccatagcttccattacaaagatctgggtcatcaaccaaaacctggaggaagacccttgtcaggcactggtccaaggccaagcttgctcagggtcacccaggacagagcccttgttgttcagcagtgcaaagccttgactccctggctgcccgggggataggctgagtccaccaatgggaacctgctacacagggtgggaggagcccttaattttcacacagtattgccaccagagaggaaatcagacccttgtctgggtgggagggaacaaggcaggatgatggattggccctcatgccttcagttcgcatctgaaatattagggtcaagggacttgcgcatggaggagagcataggaaataaaccagagagggcttggtgaccaggagtgcaagggagagcctggtgagccaggacccaggagactcaggagggacctgattcagcgctgccctgcaggtgtcctgtgcaacctgctccatacccttgatctcctacccagctgcatggctgctgctagcgcacagagctactgcctgaagattagaaggagtgcaccttctcaaggtgcctactttgcatctgtcaggaacttgtcttaatatactcactttgttggaataagatgttttgctgccatctgctagaaacattgtcataatagatacacacaagtaagatgtcagcaacgtgagaggtggccttgtacagcgcaaacatcacagttgggcatggagccttcagtaccctttgaagttggatttagctagaggctgcaataaggcactgagtcttgccttgagttgggtgtgaggcaagaagattggcttctcaaatgagctggcggtttgtgcagggctggggagcttcagtgctattgcccttcctatcccaaattccaaacttatcccttcaaaggagtttggccgcacagcgagaatgaatgtgtgtcatccaggcaggccaagggaaacttttaaatttttttagaaacaagagtgtcactctgtcacccaggctggagtgtagtggtgcaatctcggctcactgaagcttcaaaacttctgggctcaagtgatactcttgcctcagcccctgagtatcggggaatacaggtgtgcacttcatgcctggttagttttttaaaaaatatttagtagagatgaagtcttattatcttgccaaggtctcaaactcctggcctcaagggatcctccaagctcagcctcccaaagcattagaattataggtgtgagccaccaagcctgccaagggagacttttagaaagagaaggcttgcccagcctggtttgtattgttaatgttatttaaagaatctaaagaaagtaagtgggatctccagaagcagaattaagaaggcaggaggctttgagttttctttgatgcctataaacatggttacaaagcaacaatcaatttctttctccctacagtttccaaatactttaatattcaccatatcattttattcacagactacttctctgtaaaaggcagagtgggtatgatccttattttgcaaaggaagaaattgcaaggcaacgttttaagtgacttaaggcatgtactgactcagagattcatgaacatatgtcttgatttactatataaagggttcagttctagtaacttgaggaatggggcataccacaagtactcaagagtagcctactgaatgaaaaaataaagaaacataaatgaatggacagagttgttaggtgatagcattgttgaggtaactagactggccaggttgacctcatttgggataacttaggtgttactgcggttcaataaacatccaacacagaccaacacagaaataatgcttgtgactccagctataatctaagaggaaaggtaagagatgggagatcacggagtaatgcacttgcttggatcgttgtctgtaattcatcatactgcagaaagggaaggtgttttagagtccatcaaagtctgatccagtcagcctttggtgaggccttggactaattatttcatccctctggatcttagttgacccaactgtgaaatggagcaaatactgtctgttttagcaatccatataaaactctaagtgcattgtcctggaaaataacaaaaatgaagcaatgaaaacattcattgctattcctctactccttagaacatagttaaaggcattattcagcccagccatttctcagtggaagacaatggtggtcccctggtgttgtgtggaactcaagaaatgagaagagcaaataacttgttgcacagtctctgcacaacctgaccccatctcttggtctctgtttcctgaattcattcattcattcattcaggaatttggggattcattcattcatgctttcattcattgcgctcaccaggatttcaattctcctctctttccaagcatgcaccatttgaaggcatgaccatctgccttgccttgaacaatgaaatatgatcagagatgatgtgtgtgacttctgagtgagataattcaacagtcactgctctgttctccatgttctcttcccctgcctaagcaaacccccaggtctgtgcttgagaaggtggcctcataaaatgatggctcctctgccaacctgggtccctgagtaattacaatgaacagaactccccttccagcccacattagacaaagagcaggaccgagaaataaacctttaacattttaaacactgatcctcctgtctcagcctcctgagtatctggattacaggcatgtgccactgggcccaggagaggaaatctattttggatgcaatggttagagaagaccctttgagaagatgctatttgaatagaggcctggatgaagtaagagggtaagccatccagatatctgggttaggaacattccagagagaggaaagagtgaacacaaagtgctaaggtcagctcatgcttggcatgtggcaggagctgcaagaaggccagtgtggctgggtcaaagtgagtgacaaggcgagagatgaaggcacatcaaaagacatggctgagaaagtgaagaagcaaaccacagcaccagaaggaaacatttatcatcatatctaacaaagaactcatattcagaatatagaaagaactacacatcagtaagtgatatggtttggctctgtgtcccgacccaaatctcacctcgcattgtaataatccacatgtgtctgtgaaaggacccagtgggaggtaattgaatcatgggggtgggattttcccatgctgttctcatggtagtgaataagtgtcacgagatctcatgcttttaaaaaggggagttcctctacacaagctctcttggctgccaccatgtaagatgtgacttggctcctcatttgctttctgccatgattgtgaggcctccccagccatatggaactgtgagtcaattaaacctctttcctttataaattacccagtctcaggtatgtccttattagcagcgtgagaatagactaatacaataagaaaaagacaaacaacttaaagtttaaaaatgggcaaaagatttccgcaagtaatttatagaaaaagatatccaggctgggtgtggtgtggcccatgcctatagtcccagtattttgggaggtcaaggtgggaggactgcttgaagccaggagttagagacctgagcaacatagtaagagcctctctctacaaaaaaggaaaaaaaaaaaaaattagccaggcctggtggcacatacatagatacttgggaggctgacacaggaggatcctctaagcccaggagttcaaggctgcagtgagctatgattgtgccattgcactgcagccggggtaacagggtgagaccctgtctctaataaaacaacaatggcaacaaaaaaaagatatccaaagcaccaataagccaatgaaaaagaagtgttcaatcttactactcctcaggaaagtaaaattttgaaccaaaatgtgataccactataaactccaagaatggttaaaaaggctgaaaaatagcaaatattcacaagaacatgaagccaatgaaactttcatcttttgccaggaggtgagtaaaaccacactggaaaactggcaattctaacaaaggtaaaaatctgccaattttattaagcagaaattccattcctaaggatacacccaggaggaatggggagaaaaatgcacatagcccaaagctgaatactgaatacaagacaaatggccatcaacagaaaaatacataaatcgattgtggtctagtcatacaataaaataaaatacctcacagcaatagaaaagaacaaagtattgatataagaaggtgaagctcaaaaactatattgaatgaaagaatccaaacacatggatgatttcattccaaacactctatgattccatttatttactttttaaaatattatattatattttattttttgatacagagtcttgctctgtcacccaggctggagtatagctgtgtgatctctgctcactgcaacctcctcttcccaggttcaagagattcttatgcctcagcctccccagaagctgggattacaggtgtatgccaccatgtctggctaatttttgcatttctattagagatatggtttcaccctgttggccaggcttgtctcgaactcctggcctcaagtgattttcctgcctcggcatcccaaagtgctgggattacaggcatatgccactgcacccagccctatgattccatttaaattaaggttaaaaacaggcagaatgaatccacagagattaaagtcagagtaatggtgacctcaggtggaggtaggcattatctgggaagggacataagagagctttgtggatgatggacgtattctgttctttgttctggatggtggttctctgaatgcttaccaagatgcaaccctatcaagcagtacacttaagattcatgcattttaatgtgtgtaaattgtacctcagttgaaaagaacaacaaaaataaagaattttcctggcagaggagcttgaaatcatgcaggactttacaggaatagtcagtgatgtggtttggctgtgttcccacccaaattgcatcttgaattgtagctcccacaattcccatgtgtcatgggagggactcagtgggagataattgaatcatgggggtgggtctttcccgtgctgttctcatgatagtgaataagtctcacgagatctgatggttttataaagaggaaatccctttcactcggttctcattctctctcttgccggctgccatataagacatgactttcattttccaccatgattacgaggcctccccagccacgaggaactgtgaatccattaaacctctttttctttatgaatcacccagccttgggtatgtctttatcagcagcatcaaaacagactaatagagtcaggattttagatttctttctaaaaaagatgagaagcccataagcaggctcagaatcattggaaagttctgagccgacttacgtctggaaagaatgattttgtctgctgcgtgaagagtagacattggtgagatccaagtagatcgggtaaagggtgtaagtggaagacctgggagagctgaaggtgactgagtccagatgtgaaggagcggaggagggatgctgtgtaaatgctggaagtggagaagatgggatgccaggacaattgggaatgaggagcctaagggaggggctttggcctgtgcacttggcagaatgcagcagccaattactgggatgggaaagaccaaaggagcagcagtttgggaagtagtggggagaaatcaagaatttggttttgaacaggtaagtttgatgcccattaaacacccaatgaaatgttcaagaggtggttgactaattgagtttgtattaataaatagcatgcatcaataccctcaacccccaacacatacacacacacacacacatacacactcacacattggctccttcccgttcatttttttcttaaaaaagggaaaaacaaatctgaaaaatgcctttcatctattttgcagtaagggccctcgctagaagttactgaactgaacatgcagctgctggtctggaagccacagccgagatctgaaaggcaggttggcagcttgcacttgtcgggacgccccttctggatcctcgctctgccctctgtcacgggctcagcacacgtggggcatccccctgtggtgccctctgcttcagcagctctcaaggcagctctgctccccacagcctctcactgggggacccagcggggcctgcaggtggatgactgtcaggacaagtagcctctgtgtcctgtgttgaataaacacatcattagagagctggggaaaatacgtggagggaagggaaaatgtcattttggtaaagggctcagcttaaaggaagaaaagccataatgacaacattaaatatttaggtctcaggcctatcaggaggttttctgtagggcagggacttagtccgagttgtccactcacggggaggcaggcagggcagcctgcagtgatgggcgttagggtcagaagggcctgattgtccgtcccagctctattacttggttaagtatggtctttcagaagttaattccagcttgtaagactcagtgcctgcattttaaaatagacttaggaataagttagaagaggtcaagatcacgtgaaatacaatggcaccttccatgatccgtgggctattgcaaacacttataggatcctacattcttctctcttcttaccccatcccaagtttcctcagcatatggatgcaattgcatcgcattactattaagaaaccccccccccctttttttatgcttttgctgttagtttcttaactcagaaccctggcgacctcgccccactctgagaattccgagggattccaaagtgggtctcttgtggctcacaaaccgctgtagcacaaccttctgcactgaccccacagagccacacgagggcagcacatcaccagtgttgccgcttcctggtccaggagccgactctggaataccccagggtgcattcttatggggttcccaattggaccacctgtgtgatgccaggagactgtgtggcatgcaaagatggcctccactgagctgcatctctcaagactctcacctttccacatggaaggcagactggccctggacagaaggtagagtttgcaccatttcacggctttccatttgaattttgtgctctttgggaccctaggctaccatgtcagaaaactgccaaagcttctggagagatcacgtgaaaaagcctcgaaacttagagaggaagagaaagagatagacacccaggggtcctagcatcccagttgagcctctaggtgtctccagccccagttgccatctgaccacacctgtatgagagattggagcaaaaccagcagaagaactgccccgctgaacccagtcagctcatagaaccatgagagacgataaaatgatagctgttttaatgcagcaatagagaactgaagcaggtagtttgtgtttccttgcatgttcagcttgaaatgtctctgcagtccatgaaggagtggggagaaagccccatttttacagcaccacaaggcagcctgcacccctccttccctgtctcaggctttgataagtttcatgaagccaggctagggagcagtgacagacacagactctaggctctctgcctttccgcatttcctcaagattcctctcaaaatatctgttccttctccctcagctgaaaaaccctgagacaatttaacactggcagtctggtccacccattccttaggcatcctgggataacctcaagctaggactccctgctttgattaaaagattaaatgagagaaatccaaatgtgaagttatttgttctttgttaaaattatttggaaaggtgtgacctccttctgatctgattatagacacctcagggcagaaagaaggttcagagatacttggtcttgcagccatcctcaaatgtaccaaaaatttttggtagaataagtaaatattacatcttgcttgcctgcctgctaattggaaaattagtataaatattctaaatcataacatgcaaatttatctaaaagaatcactgaatctcctagaaggttttggtcattacacattctttcaaacaatgaataccaaaaccaactacagaggtgagcctgtaatatactttgtactcctaaatggaactctactcaaaaataggggaaactcttgatctagtctaactcttattttattaatgaagaaactatagctaaaaaaagaagaaatggctcacaagaggttggagattttccaggaaagttccaagttgaaatttctcagccttgaagatggcaacacaggatcccatgtctatatgcaggaacttccaagacacaaagtatgcctttaaaatctcagttttacaacaacagctatcagcagaaagaagtataaatggtccgatttttttaaagtgttcaatttgcagggtgatatggcttggatctgtgtccctgcccaaacctcatgtcaaattgtcatccccaatgttggaggtggggcctggtgattggatcatgggggcagatttccccctccttgctgtgatggtgagtgagtgctcacaagaactggttctttaaaagtgtgtagcaccttccccatctctctctcttgttcctgctctggccatggaagatgagcctgcttcccccacaccttctaccatgactgcaagtttcctgaggccttcccagaagccaacggatggccagtatcatgcttcctttactgtctgcagaacgatcagccaaataaacttcttttcttcataaattaccgagtgtcaggtatttttttatagcaatgtaagagtgggctaattgacaggggctttctcacctttggagaaggaaacttcttcaagataaggtacatgtcactgttctgtgggtctttcatcctttgttcatattgtctatccaccaacaaatacttactgagcatcttcttttcttgggcacctttgggtttaaagcctttgccctccaagggcctacaagctagttagggagatggtgggtacaactaaatgcagcaggagatgtgctgtggtagaggcagcacatgctctgcctggattccctcccatccccattgccaattctgcacctcaagtccctcctgcagactttgctcctgctggcccacatctgcgactttcttctgaagactccaagagggctactggagacaccaaaagaagagccgccacacagagacccaagtccctgtaagttcatgtggctccaggggcccaaagccaatggtgggtttggctctagctgggacacgttctacagcataagggacctccagacctcaccacagactcaggctgaggctgagagttcccctaaaattgtaccctgatttggctttcccccctaccctatcctgctcttttaatggtcagcttctgtgatcttgttttaacagggcaaagataaagcacaacttatgggacccctagctctctcttaccaggtaatgtactattttggacaacatcatttcctcccttacagttatttatcggtctgacctttccttagagaccttatcacagaaagaaattggttttctctgggcatacctgtaatttaaactctggattcatagcctgtgatgggttctgtttgacagagtactgggtctatctaactattgagggtctgaggacccaggaaatgtcaccaaagtgaatcaggggaataagttatagctgtagagatgtgaattatgggagggaatgagttgtcagagtagattgagttgggaaggcagaggaagagttatccatgagccgggccaaccagagctgcagcgcctatgcccaacagcatccgtatctacagaggagccagggagggtcatgttgtgggtgcatccaaattgttaatgactgcaaatgtagcactctcaacagcagggtacacatctgcaccctggcactcccagtctttgctgggccccatcacccccgacaacataatcaaattgcacagattcaagttcattggtctcaatccagagaaatggaagaaaaggaaaatcacctgcattagtcaatttttgtgtcactatgaagaaatacctgaggttgggtaatctataaagaaagaagtttaattggcttatggctctgcagagtgtacaggaagtgtggtgccagcgtctgcttctagggaggtctctcaggaagcttgcaatcctggcagaaggagaagggggagcagatgcatcccttttgaaagagggagcaagagagagagcaggaaggtgccacacttttttaaacaaccagatcttgtggaaactcagagcgagaactcattcattacctctaggatggcaccaagctggtgccttccataaagtactacccccatgatccaaacacctccccaccagaacccacctccaacactggggattacattttgacatgagatctggaggggacaaatacccaaactatatcattaccccgtgttggattgttaggttagtatactcccagtgagattctggagtcttctaagtggttaatgtaaaaggaagtccaaggtaactgttatacccacagagtccagagccagattctagagggctgaatttggggtcactttccaaacaatgtgatctgggcaaattccttaaactgcttttgctttaaattccccatccataaaatgagactaacaaaacaaccctcacagggttgcagtgagaagtcaatgagtttatctgtgtaaagcgcctgggataatgcctggtgttttgggagtgttgacatattaatgatccttaacacctcagtagtattattctagtttcatatgtaagcaaactgagactcaatgaagttaagaagttaaccctaattattcagctggttcttttcaaaaacattgctaaatgcttaccttatacttgctagaaaaaagcaaagctggcatttaaacggagagtccatgatcttcccacacctcactgcctcacgctagcaagatgtctgggatatttcattttaattattttattatattaagggacattcggtgctttcgggtgatctaacaaagtttcaaatacaggttcagcagggaagggctttatgaattcagaagaatgacttttaattagcccctgtatagtttacctgtgaatggataactaaaaaagtgtaaaaaaaaatgctttcctaccttttttggttaaatatttcctttgaaactgagtctcttcttttaatttgcttaatggactcctgcctttgattctgagcacagggagaggtaaatcagaacaggcattgctccagagactacagatctcacattcctgggatgacagtgaggtctcactaatgaggactaattgcgggaggagaagggcgagttactgagaagtcagaacagaaaatcttctgcaccactttgtcattttgaaatcacacaataattcaaacctggctcatacaactcattcatccatttattcattcaacagtccttaggcttcaggaatagatatgagtgatctaaaattaacatattgactacttgaatataaatgaaccattctaaagtgcttgatggggctggaaaaatgagctcttctagatgtttgaaatagttctctcctaagtcttgcttactttgttaaactgttttacaaactctttcttgagacgcttcaaggagaacttcaacttggatttgaactcagttctctgtgtctccaaagttcactattttccccttttctttatctgtgtgtatcttgcacaaagtaggtgtctatgtggttactgttgattgagggacactcagagattaagaaatgtggaccaaatatcaaagctgaaagatatatcccccctgtttcctttcagagacctgaaattgatcctactcttctgtggatggtgtctgttcacagtggtggcaatgagggcaggttcctggatcttgggcatttatcttgtttctacaacactctcctctccctgcacctacactgcacctactccacctcagaatggatgctcggatgccccatggaagtgggctgagggagtgaatgagtgaatggatgagggtatgaataaatgaactcatagcatgagggcacaggcaccctgtttatattctcacacctcaagggaccatctttgatgcttcaggtgtggggaaatgtttagcagagatttactggggagtcacaaaaccacttgttgctcctttgtcaggtgttttttgggaagtagacatttgaagttcctgggatctcttgctttaggacagacattgccataggagtgctatattttaggggggaggtcagaacatcatttggagcccttgcattagaacagaattgaatgttggagggagacgtgagtagcagaaaaggtagaaaaacagagtttgggacaaattcattgagagtcagagtttggaaagtttgaatcaaatgtctttcacctaaggtccataaagaaatctccctgctgcctccatctatgctagagttctgctgggactaatcaataagtaattagaaagagctaggaatttaatatacagagagattgatgggaggagtctatacagtggtaaatgaaacactaaacccccttgggactttgggggaaagttcctgagaaaggctgagctaactgaaggtcttcagatattcctagctcatccctaaatcataagtgtctcagcttaggccctttcctctgcccttggccactccaggaatcctggatagctggatgcaggtctatctcctcttcaatgtgcccacatgggcctttgggaaggctggcctcagagcaaagacagtgttcagaacagcctataaaacaaggatagtcacaaactggggtggggttgggggagctgttgtgatatgtgtacccaacaggggagggctagatgaacagagcactagaaggtgacttaaaatcaaagaaaaaaatgatgattcataaaatgtatcatgaatgcatggggtaaataacaaaattgttgaaaatttatatagatgtaatttggccatctccaccaaaattgaaaatacacatatctttgattcagcaattccacttctaggaatttatcctacagataggctcaaacacacataaagcagcaggtgcatagggttattcattgtggtattaattataagatcaaaagtgtggaagcaagctgaacacataaaaggatacaattaaatacatcgtagcacatgtgttcaatggaaggccaggaagaccaaaggagtcattcagacttttctgaattcttccttcatgtcaggcgctgtcctaggtgctgaatatagaatggtgatcaaaatagtcaaaaaatccctgccctccagaacttacattttggtgggagatgcttctctttatgtattgatagaaactgatctctatacctccatgttcttttgttacataaaaagagtaagatgcaggcgctaaggaaattctttttttttttttttttttaagacgtaatcttgctctatcgctggattgctgtggtgcgatcctggctaactgcaagctccgcccccggattcatgccattctcctgcctcagcctcctgaattttttttattttttattttttattttttgagacagagtcttgctcttgttgcccaggctggagtgcagtggtgagatctcagctcactgcaacctctgcctcctgggttcaagtgattctcctgcctcagccttctgagtagctgggactacaggtgtgcaccaccaagcctggctaatatttgtaattttagtagagacagggtttcaccatgttggccaggctggccccaaactcctgacctcaagtgatccgcccaccttggcctctcaaaatgttgggattataggcgtgtgccaccatgcccagccccctaatgtcaatgttgatgtttgcattaagtatctttgaaaggacacacaagaaatttatagcatggcatcctctggctagaggacaggagatgttccctgtttactctttggtatcctttgattgttgagccacttggaggttatttatttttttaaaaaaactttaatttgtttattaaaagatagatagaatataattattggccctaaccctgtcccctcacttctgactccaacctctgcaggaaagaaaagggtccagtgcaagagagacggatgctccagaggatcttcttgtcagaagagggaactcctaactaaaagcctggctaatatttgccttagccttagagagctgtatttgcacgggttcctaatggtatctggtgaagcccccatcagtcctttctccctgtgtgtgtgttgataaccaatcaaccttgtttgcctaggactttcttcattttagtactacaagttccatgtcctgaaaaaccctcagtcctggacaactaggagagttgatctccctgaaagggaggagacggagagggtgagggagagaagatggagacctcaatcatgtgcatacattcctctctgagtttcttacctccctggcacttatattctaaagtccccagaacatggctcttctactgattagatacatgacttatctctctgagcctcagtttatttatcaacaaaaggggctaattatcttccctgcctgccactgctaagaaattaatatccttttcctctcccagcctcatgtcatcatggcccttctcatcctgccaagcttctgtggaccatcacagtagttaccctcgctcccgttcagatagttgtctggctaaatcccgacctggctagatacagttattgtcctactctttccctgaacctgagaagaggatgcagttggagaaaactacactcttaggctgatgggtctcactttaaattgtgaccacaagtgactggagggcccttggcactgctgaacaacactggtatttcccagatctcatgactacttcacaccctttcccctccccctaggcctctgcaaagcagtcttagttgagagccctgaatctgatttcactgagaaaatagaagcaatcagaagaaaaatatgtcatctcccccctaccccacaggcacagcctgcatctgcgccaggctctctgccttccctcatgtgctcccatctgaggccagcccttcctccagtgctcccgtgtgaggccagcccttcctcccatgctcccgtccaagactagcccttccctcctgtgttcctgtgtgtggccagcccttcttcccttgcatccgtgagaggccagcctttcctcccctgtgaggccagcccttccccccgggctcccacgtgaggtcgaaccttcctcccgtgctctgtcttccacttttcttaccagctccacaccatggtccctgtgatagtcatttctctctctgtattatccctcactgcccctcatgtccttcccacaccacccgcacttctggattgctgccaactgtttacagagaagctgtcaatctcatctcatttcctacctacccctcttccttcactcactactaaattgtgttccccacaaatgtgtatgttgaagccctcacccccattgtgactgtatttggaaacagaacctttagggttgtaattaaggttaaatgaggttgtaaggatgggaccccaatccaataagactggtgcccttataagaagaggaagagacaccagagtgcatctttctctgtgcacacagagaaaagaccatttgagggcacagtgaagaactgctctgccagccaaggagagaggtctcacccaaaaccaaccctgcttgcacattcattttagacttccagtctccagaactatgagaaaataaatttctgttgtttaacccatccactttgtggtcttgtattatggcaactcaagtagagaatacacttactgtgttctggccacactgactttcttgctatttctcaaaaattccaagcatgttccagttcagagactgcacttcgctgttgctgttgtttggaatgctcttctctgagatccctgtatgattctctcctcttactcaatctcagatcctgtagcagtttctgtgactgtcatatctaaaatagtgccccgtgcccaaactcttcaccctcatactctgtcttatttttctttctactgcttgcctctgcctgccattgtgtttgcttattttctatcttcctcacttggacaagagcccctccatggagaaagtttgttccctgctctagtccttgtgtgggaaacagagtctggccatggcaggtgcttggtgagcctttcttgaatgcataagtgggcagtgtgaagggctccgtgcttttcctggtacaggccattaggaaaggttcactgtattattcctgactgttcttctgggtagtgaccaaagaaaatgccctgggtgacttcagacatagcaggttcctttagaatggaatcaaggaaaaatacatatgttagaggtagagaaatgagagggagccatagcttggagtcacatagtgtgggtggagggttggctgggaagtgtcatagttttggtcttaatcaggcaaagacccagcagaccttagagaattgtatttgcaagggttcctaatggtgtctggtgaagccccatcagagagccaaatccctttcacaaagtcctcaacagcggctacccacctccattgagcactccctgggatcactcactgtgctccagggtgtgaatcaattctaatgattagaagggtctccctcccttctaactgctgctgtgtcccagttctgctctcaagagccacagtcaacaagccttatttttcttccactggaaacttcaccattcttgtttcgtctctaagctcaagatctctgttttcaaattttcctttggcatgaatgaatgagtgagtgaataaataaatgaacggcttcaagatcctcacagtcccagtcaccctcctggtctctgcttgttcagtgacttcactttgaagtgtgttgtccagaacatttcttggaattcttgaatctttagtgcttgatacaagcaaaataataaaggtaagaaaatagtgctcaataaatatttgctggctgaataaatagacaaaaccctgtctcaacgggtctgctgggctggggctataaagaggccacctggggaatttatttttcctcccacaatgagagaaaagattatgaaataggaaatcatcctgccattgctgaggaaagtggggtcttggtgggtcagcacagtgcccgaggcagcgataaaagctcagcctgctaataattcctactctatgaatttatgaaaatcccatattttatcatgcagacattttggaagggaaatacattttctattaccactggccttttctacactcaagccactgtatctgctgctgaaggcaagacagccccctgcctcagtgtctcccgccagcctatggagaccgtgaagatcccaggcatctgtttcctgtgaggcagaagattgtagttggctcactagaccagctatgcctctgtgatgattcactgactctttttgttttaagttttttttcaattacaaaagcaatataagcttataaaaagtcaaataatggagaattatataaagaaacatttaattgtcttcttatttttcctatcaattgtaccctcctctccgagatcattagggagtgacctttcacactttccctatacttacatagaccatatatggaaacatgtacaactgtgccccagtttttgaagtcccaaatcaaatcataccatgtactttacacggaaacgtgcttttattcacaaagacatatatcatgggcatgtttttggccaattgcatatggatctaaataatgtggtctctttttttaacagctttatcgaggtgtaactgagatacagtaagctgcacatatttaaagcatatgctatgatatattttggcacctgtaacactgtctttttagtgctgcatcatattttattgtttggagacaccacaatctattcatctattcctgtattggtagacactgacattgtttccaagtttttgctaatacaaaaatgctgcaactccccctgctccacgcctccacatttattttacccttataaactgaggctttgtttttatggggtaggttactatcagtaggattgctgatcaaaaaatagactcattttacattttaatcatcagtctcatcagattgttttccaagccacagccttagctattacgaacaagaggtgtccctggtttgttctgttgaatccaggaccatgacctcaaaccatgctgtgactccctaaatatacatgtctctgctccaacattctttgtaggacctcctgtctctttcctgaatgggatatcttgggaatggtttggcttgcttcctcacatttgaacggattagaaatatttttaatctggtttaaatctcaatctagttcactgctaattgtaaactgagaccgcttataggtttatttaacttctttgaacttcagattcctcatttaaaatggagacataaagagtgctgcacttattgggttgtgaggattaagagagcaccaatgtgtaaaatacccctaacagtacatggaatttagtatttgctcaaaaaatggcagccatccttattgagtagattcctgaactaacaggaaagcgtccacctgcatataatatccattccacccaagtcaaggaagagacagtttactttgaatatgcacaaaagccccaattagacttaaaagtaacttgtgagtaggaatttgcaaactcttcagactgcaatccagttggatatggcaaatgaccccaactcttctactcattccaactttccagagaaggaaaaacccaacttggtaaacaaaaaaataaataaataaaaataaaatgaacaaaataaggaatatggaactaaattgctggtaagatttaatagctcactggttcagttactggtcatggcaattagtatataaaagtaggtgtctaagaaattgagatcattagcctgtaagaccaaaggcttgcattttgtgacacaccagctcttctcaggccactggcatcatgaggacctcacttcttcattgagagaacatctggtccatattgccacccaaagcaggagcccctgttttgtccatttggcctcttcttagatgtggttgatgatggagagctcaccaccccattagaaagctgttggatgacttgaatcattagacaactttacatggtgcttgtcatccttcccccagaccttcaggatccccttttattttcatatgcttccaaaagtcagcacctgcattttctggtctgcctctgggctgccagaacctaatttgttcaccaatatacatgcaccagcctataaataccctgatccttaccctcaggtgggataattctgggggattgcgttttacaccaccaatgagtctccctgagccaataagcttcagtttcccccagtggtagctggcttaatatctaactccttcttactgccttccctcctctgtgtcagtgccccaccctacttctactatccccacatctaccaattgacctacttgcactcaatccttgtttctgacctgctcctagggtggggacgtataggcagatccaactaaaacaatgcccaaatcttatctgtgacttacaccaactggctctggttcttctgggctctcccgctagaacaaggtgtatcaagtctttgtgtggcttaggtggcttaagtcagctctcaggttttccttttccctaaggtgaacatctccatttccttgattcattgctcccaccctaggaagctttgacccagtcttggaatgttactaaagtttccaaggaagaaaagaccaaaagcattatttaaccacgatgattcttttgtcctggtttgcccatgtttaaggtaagaataacagccccagttctggcagaaagctgtaaggttgacaaaatggcagtgctgtggtgatgcattcaaagagaaaattacttctaagatgcaatgctctatgtttcaagatgaagaaccagggtgctcaaaatgttagacaaatgtcaaagtttatatgacaaatgaataaatagagattgaaatctgtgtcaggcaagaactgtccccacattagtgattctatgtgcctattcccaaagtgatccatgggtcaaaccaaaaagaggggatttgagtccatcagaatcattcaaagggtggagggaagagcatgggatttgaagccaagacaagctgcattcaggtctcagctctgtcactgttatgtgtgaccttagacagatctcctaagcctccaccaataaatttgtagcaggcccttgacaagaatgtgatgtaataaattaaaaacaattagcaatggtgaagcagacagtaaatgatagccagtggagctgcagttgcagaaatattattctgtgaaggtgcagtgaattccagtcttctaagctgtgctctaagcttcagcacaggtgtctgaataaaagctgcacttggcctctcactgagagctcctgagaagtatctggtgagtatcactgtggtagacattgaaggggctaccaaaatcaccagaaccccaggctaggagaggggataaaacatgtgtgttataaccacattaacaggagagaaaatggaggagagaaagaaaagaaacaaaagaaagaagaaagaaagaaagaaagagagaaagaaagaaagaaaaagaaagagaaagaaaaaagagaaagaaaaaaagaaggaaggaaaaaagaaaaggaaagaaaagaaaaaagagaaagaaagaaaagaaaaaagaaagaaaaaagagaaagaaagaaaagaaaaaagagaaagaaaagaagaaagaaagaaagaaaaaagaaagaaagaaaaataaagaaagagagagagaaagaaagaaaaaaaagaacagagggagagtcaggtaagagccttgggagcccagaggcagaaaggagagccagggttattcaaagtcatagccaagtacaatatatgccttgaagaatgaactagaataagtagagacaggagagcaaagtaggtttatggcagatgaagcactgccactcaagggcccaaatattatgatatatagtttgggtacagcaagggctatgtattagtgcgttctcacactgctataaaggactgccagaaactgggtaatctataaaggaaagaggttcaattgactcacaatttcacatggctgggaggcctcgggaaacttacaatcatggcagatggggaagcaaacatgttcttcttcatatggcagcaggaagaaaaagtgctgagcaaaaaggggaaaagcctcttataaaactgtcagatctcgtgagagctcactatcatgagaacagcagcatgggggtaaccagtcccatgattcaattacctcccaccggatccctaccatgacacttggggattatgcgagctacaattcaagatgagatttgggtgcggacacagccaaaccacatcagctagtagcaaggaacatagacatcagatgggaaaggttggctggaaacagaccttctcctcctccttcagggctggatgaggatgagatactacacacagtgcattccaagaacacctttaaattaactcaccagttctccctcagagattcagctgcatatgccttagccactactatgggttgtggggtatggttctgggaccagatgggcttggctatataggaaaatgaatctaggactctgctagagtctctaaaaatatagctgctattgtcccttcaacagggttatagtaaggggcaaggaaattcacattctgctgtttgaatttagatcccttcaacaccttaagagactctctcggctattacctcctccagtatacctagccagccctgtgtgcagactgccagggaaggtgcttgctcaggtagacccagaaagccttgggagtgcacggagctgtcgaaggggcttctaggcaggtcaagggcatcagggagaggcacagagagtgactgcccagggtcttcagacccttaagttgcttttatttttttcactatgttttctggtaccccttgttatgccaagatgcaccagtaggttggaaagcatgtcttcctggaatcagtatatttggtttgatttttagttcctcttctgaattgctgcatgtcactgactatctctgggcactttgttcctcatctgtgatgtgagaatttcaatacccattatgcctgctacacaggactgataggaagatctaactggatgaaagaggcaaaggctatgtggacactaaaatgctttactttttacatgcgtgagcctgctctttgggcctcttccctgctggactgcagaagtcaatggaggcagattcaaaactcaacaccctggagattccaagggggcataaagataaaacagtagtgatgctggggtgatgaagagtctcctggaccctgggcaggcaccaagcattatctccaggcatgctggtagtcagagttatccatctcagcttctaaaatgtttgtgtttgccactgataatgctgacagtgacagacaatgcagttttctcctgctctactcagacataatcaccatgagcccagccccagcaccagcctacccatgctcaggcaggctatggcattgattcttgctgacattcagatagcccctgaggccaccatgcctagatgccctgccagagtttggaacagaggatgtctgcggcagatcctgatggacagaattaggctaagtgagaattcttagcttagtggcctagcagtggggagctcatggaatgagttctgttattcctaccatgaggaaaggccagtggtcaaaggtctaggcctggccggacactgaggccattcaggtgccagatgatcaccagaaactttaggagaaatggggcctgcatatagtccttgcttgagcatggccagagaagatgtgaaggccagtttctggccaggttgttccagttgttcatatcgatctggatatgagaaagcaagaatggaacatgacccatctactgtacttgcatagactgattgctgcccacgccccatttgtttccagtgctccagccacaagggcactcttgcagccccctactgtgctgtggtcattaagcctctctaaccacaagctattcccactacctacaatgccacctccctctcattttttttctaaagctggctggctgacttctacttatccttaagttgaagcacatttttttgatccccactccccaactggaaaagcactgtgttcgctcttgctggccttatagtgtattagaattggcttgtggacattttgtgctcctctagagaggagtgacagagtcatacttaacttagtgtcttctataatgtggatgcacagagtaaatctcaataaagatctgatgggcaggtagacaaatgaatggataaatttacggaacaatgcaggaaaaaactccagcataatgacatcacatggaacactccttggagatttgcagctgggaaatgggtggcgtggcccagaacatagctctccccaggcataatgggttctgatgttcattggtcacaactgaagacactggaaactgcttttgaccagatggtgatgtaaatcaccctgtctaccactgcctcacgtccctggcacacgcaccgttcctgggtgcagggtggcatgatccatgctgaatcctgctggctctctgggcctggccgagataaacatttggtactgatgctgattccccagcagccttctgatgaaaatgagattctacgtatttttccagttcctgttggtaagtcctagtaacttgcctatctcctgtcactggcgtgtgctttccagcccttgcctcctctaccctttatcttcctaatgggttcagtcacaaacctctccctgctcttgcaaataatcctggacttaggaatttcatgctggcatgaggggctctgttggtctacttctcagcaaaacaagcaacactggtgaaactacttttaaaaaaatccaaattatttaaagtctctggaaattgttctaaaggcatacagcaaagatagaaacattcataaaaatctactataatgtggtgagaacaatgagggactgtggcacttgagccacaacttgctccctatcttccacccactacccagttcagcttgatggaagctccatcatgtgtgggtgtggctaagaagacagggcttcctctcccctcagttcccaagctagggttaccacatgtgatagttaattttatgtgtcaacttggatgggccattggcccaggtatgtgttaaagcattattctggatgtttctatgaggatatttttggatattaacatttaaattggtagagtttgggtaaaacagatttccctccataatacaggtgagcctcctctgaccagttatggcctaaataggacacatgattgatctcctgattttccctaagccagagagaattctgcaacagacagcatttggatttcaatcacaacacgagctctttcctgggattcagcctgatggcctttggacttgaactatagcatcagttctcttctgcatctccagactgctggccaaccctgcagattttggaattgccagcctccatactcacgtaatccaattatttaaaattaatctctctctctcccttccccctgtctctgcctataggacagtctttgccccaagtacaacaggctgtgaatactggagccctaaattactctgactccagatctttcgtaggacatgctggaagaaacaagctaatcagaggctagcactctgcccagtgcccagagtaatggctcagagattttgcctagccagtctctaaggagagagactgccaaagctccccttaaaggaactgactttgtttgaaacagaacatggggaagttcaagcctaagggtgtattcagaaaaaataactcctcttattaagagcaatgagtccagttagttcactagaaagaaccagagaaacagactgctaagaaacaccctgctagggtcagagcaaacctcaaagactggtctcaaaaactaccccttttccaatttaaatggaccaaactgctgagcaatttatgtcttaaggtgttgttgaaaacagcaaagcaagcatctagtaattagtggaagttaaagactgggtgtaataccaaatcaggaagatagtttaacagacagattagtaaacaagcatccaaagagagctctgctaaaactactgctatcctaggtgagcactgaggagcaagcaacaccaaaggcttaacactgcatggggaatagacttagctaaaatatcccagccaagtcacaaaacaaataaataataaaacaagaaacacaagagctggagttgtgggagggaaatcagtatccagaattgctataatgtattacctaaagcatccatttttcaacacaaaattatgatatataaagaaacaaaaatgtgtgacccatatacaagaaaaaaagcaggcaacaaaactgcctgtgaagggaaccagatgtcagatttgacaaagacatcaaagtagacattatacatacgttcaaataaccagaggaaagcgtgcttaaataagtaaagaaatagctcatcaaatggaatatatccaaaaactggcagaaattataaaaaaagaaacaagtggaaattctggagttgaaaaccaaatcaacgaacatgaaaaattattagcaaggctcagcagtagatttgaatgggcagaaaaaagaatcagtaaatttgaggatagatcaacagagattattcaatccaaagaacagagagaaaataaaataaagaaaaattagcagagcctcagagaaatgtgcgatacatttaagtgtaccaaaataaatttcacaaaaatctactaaaatatggtaataacatgagggcctttggcacttgagccacaacttgctccctatctttcccctcccacccccagttccgcctgatgaaagggccagcaggctgaagacccagaggagagctgatactacagttcaagtccaaaggtcaccaggctgaagacccaggaaacagctgatgtggtttaagtccaaatgccgtgtgctgcagaattctctctgggttgggggaggtcaaaatgtaaaaagagataggagcagaaaaatatcacaagaaataatggctgaaaaaccccaaatttactgaaaaaaaaaaatcaatttacatatccaagaatctctacaaactccaagtaggataaatgcaaagagctccacacccagatacagtaaaaatgctgaaagtcaaagtcaaaaaaaaaaaaaatcttaaaagcagaaagagaaaaatgactcatcacataaaagggaaacccaataagattaaccattgaattcttaccagaaacaatgtaagtcagaaagcagtgggatgacatactcaaagtgcagaaaaaagaaaaaaaaaatcttttaactgagaatctaatgcccagaaaaactatctttcaaaaatgaaggtaaaataaaggcattttctgataaataaaaattgagagaattcattgctgaacttaccttatggaaaatactaaaggaagtgcttcatgttgaaagtaaataagcctagatggaaatttgaatccacatgataaaaacaaagagcacaagcaaaggtaactatataattataaaataaagtataaatgcacgtttcttctttcttctcttaactgatttaaaaacaaattgtataaaacaatatgtatataattgcattgttgcacctgtaatacacagaaatataatatatttaacaataaccacacagaaaaggtagacaggagcaaaatcatattggagtaaagaaatgataacagatggtaatttgaattcacagaaacaagtggaaattctggagttgaaaaccaaatcaatgaaaatgaaaaagagaatatgaagacaaacaaatgataaattaaaggtaaatataacaaattctataaatgtatacatgtcttcctttcttttcttagctttaaatacatatacacatatatgtatatacatacgtgtacatgtatatacatatacacgtatgtatatacatgtacacatatatacatatatgtatatatacatacatgtatctacctatatatgtagatatacatgtatatctacatatataggtagatacatgtatgtatatctgtagatacgtatatgaatatgtatatatgtgtatatatgtgtgtatatgtgtatatgtatgtatatctacatatatgtatatatacatatatgtgtgtgtatatatgtgtatatatagtttttatactcatatacctaatgacagagacctacaatttatgaagcaaaatctgaccacattgaagggagaaatagacagctgaacaataatggttagaggctttaataccacacttttaataatggatagaactcaagggaagattaacaaagaaataaaagacttgaacaacactatacataaatcagtcctaatagatctctaccgagtactcaattacagcagaatatacatttttctcaacgttttctcatggaacattctccatgacagaccatatattaggccttgagacaacacaaaatatattcactgattacaatgggatgaaattagaaattaataacagaaagaaatttggcaatttcacaaatatgtagaaagtaagcaatactctactgaaaaatgaatgaatgagaaaataaatcacaaggggaattagaagaagactttgagatgaataaataaagacacaagatacagacttgacaacgatgttctcctctgtgaaacgggtaacataatccctgttcagcctgtcttatagggtccttctgtaggtcacatgaatctatgattgtgaatgtactttgtagattgtcttacaggtataaagttctactatgatgaactctctgctctcctgcagggcacgtgacacaaaaccttgctcccatccagccgtctttttttttttttttttttttgagatggtctagctctgtgatccaggctggagtgcagtggcatgatcacggctcattgcagctttgaccttgtgggcttacgtgatcctcccacctcagtcccccaagtagctgggactacaggcatgcaccaccacgcccagctaatttttgtatttttggtagagatggggtttcatcacttgcccaggctggtcttgaactccagagctcaagtgatctgcctgcctcggcctctcaaagtgctgggatggcaggcgtactccattgtgcctggccatccttcccacactttacctggacctggagatccgttgtttatgctttgcttcttttacctccagttgagatgaagatcatgctactcttgcttcccactgctgctgtcaggtcatgccacctctccctcagattctccccaacttccatttttctccctatggactccacagaatgtgagatttgcaagtccagagagggagtgacttctccaaggctacaggccaagacagaggcaaagcctggactaaacctccctccccttcttccccaggtctgcagggtcctcaggacactcccctctggtctctgatgcctgcctctgacaggcgggcctcacctcaactccatcccctgacatcatccccgcatcttcaagtcactttagttttagtgaaagaagccagtgctaattcagtgtgtaacatgagctagacattctgcattctcaggtggccctcaacaacctcaagtggaaggtaccagtatcatttccatttcagagatgaggaagtcaaggcttgcgaaggttaagcgacttgctagagagcgcacgccttgaatgtaacagagttgagctttgagcccactcaatctaactgcaaagcccacccttctgccggccacactctctgggcagttcctctcatctcttgccctcctagccacctgcctccttaagcacccgcctcctggtgcctgcttccctgattccttgcagctttccctgagcactcttgggcttctcccatgcaaactgccacctcccaggtctggagatgtggaatcttgaaccccaaactctggtcctttcacctcttccatccttcagtgcaggggcttggcctgcatccagagcagtttatggaaactcctttggcctcagatttagcctctgcaagaggagacacagtacagtccttcctcacagggcattcgggagaaagaagtcctgagaaataatggtgcattatttaaaagcagggcttcctgataggaaagaaaaaacagaaacccagaccccaattcactaactcatcatgggtagggtggaagtggcaggatactgcccctcctggtctctgcctccctgtctacaaaatgagatggcacggtggtggcctggggattccttccacctcccaccttctgggccacatgagaatagaagctgccctcatgatctctgagctgccttacggctctagaactccaggatgataaatatataaggcttcataatgtcctttcttccttcgtgtgcctcttaagtgattagtgtaatactctgtacacaatagacttttaattattatctgtggaacgcatgcatgcgagagccacgcaggagctcaaatgggaaggaactgaagtcccatgggacaacagtccacggaaacatctccccagccttcttttcaaggggaacacaggacacgtgtctgcagcatggccctgggctcagggggccctcggcacagcctaagaacacttggctgcccctccagaggtgagaggagagcaagctggctcctgctctcctttcttcctttccctcctgggcaggggagcaggaaggtgaagcagcaccacctaggagagaaccgggttggggtgcaagagcacagcttcctctggagctctggcaggaagggtggtgtgtgattctccctcctggaggcctttctgtcatgcatgcttcaggaccctttccctccctttccccctaccccagggaaacaagacccctctccttctccagctgctcccccaaccccaagaccccatctttgcttggtaggactcacttcctctactgggaggagagcggcgaggcgttctctctgtggagcacaggagtgctgtctaagagtgcaggtgggggctcctcggaccgtgtgggaggggcgctttcaccagtccagcccctgttcctctcctctactcctgtgggcctgggggtctctcacatggatctcactattgaaggggaacttcttagtggtcccaaccttagcaccagtttcatgcacagatcctgagctggctgtccccatctggaccgccctctccatggctccctcccacacctcagagctgtcacttggtgggcttgtcatgcccaccagactgttacttatgggaggagaggacgactgcctctcttacagcttgccccggcctgacacagcctccagtcaacacccacttcaccgtcagccctgcctgctctccaatttggtctctgtcatgctcaggcctgttctatttctaagtccgtccaaagccagtgtggattggagaaagagggttattggcaggtacaggattggggggcccagctttgtgtgccttgaaatgtcccatgctgccaactccaaggctgtgctgccagtgagcctcaggagtgcccgagtctccccccatgccatcttctgccaggcgggacctcagttagggaccagctgtggggaccagcctccctctttgatctaaatatccactttccagtttttcatgcagttcctcacttccttcctctactcctgtccattgcatatctattctgtgccagccactccgctaggtgtagggaatgttgttgtgatgtgtgggtgtgcagggtccctgagggagaaactgaggttcaaggaggtcaggtgaggggtgagcagatgtggtggagtcagaagacccagagagcccttgtcccactctgcagaagactatccaggaccctgggcaaccccttcctctttcctggactttggttcctcatccttaaatgaacagattgcaaggaactgagggggaaacggtggttcctgaggtttggtagactgatgaagactggatgctcttctcagatgagctcatgtgcacgatattgtgcaaaataaattcagtgcactcaggaggccctggagcctggggtgagatgctcgctaggaacctttacattccagaaataacttagtgcctagggcccagtggttaataactccaagatgacttagtgccgagggccctacatttaataacaggacttagtgcccaagaccctacagttaataactccgaacagtgcccatgacctgcaccctatgtggagtgcacccggatgtcagagtttgtttttctgtttataatgctttgtttgttttgttttgatctaagatcattgagacatcaggcattgtctgattgggctagggactcagcagggctgatctgtgatttctggagtcttcagagaaagcttcctgtatgttttccttcctacttacacccaaccagaagcttaaggcagctggggatggggagaagggggtgattcatctttctaataaaacacatccatccagtttcctggggaaacacattggagagatccccaggcaagactcagggaaataaagtaataatgttatcagtcttcacagagctatttaaatacagattgggttgctgggagatgaaagggggccccttttgttatgaaaatgaagggagatgggagggttgagtttgtgttttgatatgttaatcagcttggaagccacccagggtagggacgggtggggaggctgagttgcctggcatatttatttgttcagtttaatttaacagctaggctacaactgggctgcagtcgggattgtgtaaagatgattacagccctatcattaatcagatgcctgcaggagacggctcatagcttgctgctaccttggctgcatacagatctgcagccgccctgacacggcaccaatgtggtctcattccgccatctagtggcactgccaggaattgttctgggaaagtcagaaaaacaaagtattttggtttctttttaaatgatgcggccaccttctagaataaacagaaactgctgctgtttctgaagagataagatatagaaaggtctttggaaattaagtgaccagtcttccctttttaccgatgctgaatttgaggtctgagacagtaattttttcaaggacatagttttttttttattgcgactagaattttgaattccaaatccattgattttcctaacataccaatgtatataaacacggatacgtctccatccctcacgctttcatccattctgtttttcaactcttctgtataacgttttggtttactttttctttcctttggattcagatcccgatttcatttaattctagtttcccctgctccctgcatagaatgacttagagtccaattaagaaacaattactccagctgatggagggtcaggggagctgcaacagcaaagaatgaactgtcctgtagaactggtagacttagggggcagaccgggtgtgctgagaggcagcgggaggctgggagggaatgctaggctttggagctttcctcagcccagcttagggaagccgggggtgggggtgaggggtggggtgggggtggggaagattatactttggttttactcttgttaaagatgtccttctgttaacatcccacatttgtcgtctaagcaccacctgacagagcaggcactgggaaggagtgaagagcaaggcaagtccctgccctctagaaggttgcagtctgggtagagactgacccaggaacacatacacagagtagggtcatttttccaagagtagactcagctggtggccctctgagagtcggccctttcaaacagaaatttaaaaaaatattaaaattaagataaaaaagagtttcactttttcctccatacctctcagaggaaattaaaatgaatctaatttataaccttagcaccacttcttctaacccctttctctccacctcaatcattcccatactctacactctgaacgctttcattagcaaaaaaaagtcaaaaggtggggtggttagaagaatgaaaagacaagccacagactggaagaaaacatttacaaagcacatatctgaaaaaggaattatatccaaaatatacaaagaactcttaaaattcaatactagcaacataagcaacccaattaaaaaatgggccaatgatcttaacagacatctcaccgaagaaaagatatatgtatttatgactctttcatgtcttttggggactggatagaccatttccttttatcattgaataatatccatggtatgggtctacatagatggcagataagtatacaaaaagatgctccacatcaatgtcattaaggaactgcaacttacaacaagagtgagatgccacatacacctctgacaatggctaaaatccaaaacactgacatcaccagatgctggtgaggaggtggagcaacagcaactcccattcattgctggtgggaatacacaatgttgcagccactttggaagaaagtttggcagttccttatggaatcaaacatattcttaccatataatccagcaatcaagctcctaggtatttccccaaacaagttaaaaacatacatccacacaaaaacctgcacacaaatgtttatagcaatgttatttataattgccaaagaactggaaacaatggaagcaatcaagatgtcctttaataggtggatgaatacactgtggtacatccagacaatggaatattattcagtgatataaagaaattggttgtcaagccatagaaagacatggagaatcctaaatatgtattgctaagtgaaagaaatccatctacaaaagctacataccgtatgattccagctatatgacattctggaaaaggcaaaactatggagacagtaagaaaatcagtggttgccatggattgggggaagaaaaggagggaagaaggggtgaagcttgggggtgggagtctttttggccagtgaaactatcctgtatgatactgtagtagtggacacacgtcatcatacatttgtcaaaacccatagaattgtataacacaaagaatgaaccctaatgtaaacaatggactttagttagtaatgtgaaaagaaaaacttcagctgaattaaatttaaaggagtttaattgagcaatgaacaattcgtgaatggggcaacccctagaatcacagcagcttcagagagactccagtgcagccgtgtggtggaggaagattcatacacacaaaaaagggaagtgacgtaaggaaatcggaagtgagatacagaaacaactggattggttacagctcatcctttgccttatttgaacacggtttgaacacttggcggtgtatgagtggtttgaagtatggctactgggattggccaagactcagctattgttacaggtgcatactcctaaattaggttacagttcatccacgaggtctcaaatatagaagtacagagtccttctcaggccatatttaggtcactttaacagtaacaatgtatcaatattggctcatcaattgtaacagatatatcacactaatgcctgttgttaataacaggggaaactgcagctgccggaagagagcgtacataggaacactctatactttctgctccatgtttctatgcacctaaaactgctctaaaaatcaattttaaaaacaaaaaataaaaagatgggtgggaaggggtactgattcccttcctccaccccagcctccctgcaccacctctctatccctgttctttatggggtaggttgtctgaatctctcccttgcatgtccctcccctcttctctcacctttgagaatcaactcttctcagcccatcttcagattctgctcctaaaacatcagggatgatggtggggggaggggtggagagtccatccgagttggcaggtggcgttccttctggttagaggggttatgcatattcattgtgagaaggttcccagcatctgggctccggatgtcacacagacactccgataaagctatggacataccctaaggcctcctagctctaagcaggcccagcagctcagaggtcacccctgagctcctgggggcttcctgctcctgggagcagctaattgtttatgcatctctctccctgggtaaactgcaaactctgaaaggtgaagactacatctaattcatgctgttgttccttctcagcataactctagcatctaaggcagagtatatgctcaaacttcaattatcaaataa[187 bp omitted]gcatggtggcgggcacctgtggtcccagctactcaggaggctgaggcaggagaatggtgtgaacctgggaggcagagcttgcagtgagccaagatcgcaccactgcactccagcctgggcaacagagcgagactccatctcaaaaaaaaaaaaaaaaaaaaaagaacagttccctatagacagtgagaatgttgccttgtataacaaaaaggactttgctgatgggattaagttaaagatttttgagctgacgggattattctggattattcaggtcaggtcaaggtcatcaaaagtgtccttatgagagggcagaggaaggcagggggacatttgactacagaaaaggagaggacaatgtgaagaagagatcagggtgaggtggccacaagccaaggaatgctggcagccaccaaaaagctgtaagaggcaagcaaatggattctcttcaaaacttctgtgtggagcacgaccctgctgttaccttggtttcagcccagtgaaacccatttccaatttctgacgtctagagccataagaccctatgtctgtgttgtgttaaagcctctcagttcctgatgtgttacaatagcaacaggaaacgaatacagcatcattcactggagatgtttccttcctggtttggtttatctttctgagtctctctttgggatgtcactaagctcataggcttatgctaagcagaaacctgctcttagagatgaatgatacatttgaatggacatcattggagactgaatgctttagttgatcatttaacacccttcattgggtaacaaaatctaccaaacactgtgctctgtttgggacatactgaaagggaaattagttcttggtcttcaaggagtttgcaggagaacagggaggcagtcatgtaatgaagaaatactagatctaacgtgacgtaagagtgtgcaaacataaacacgcaggatacagaggggaccaaaggaagaggtgacccactgggtgaagaaggcatcagaggatatttacagaggagatgttgcagcagctgagccttcacaggcaagttaggtgcacgaggagggcagagagggcccctgtgatgtgcagggtgaccccctcaacatggtgatggatgataagcagggtggggaagggagtgggcatcatgaccgggaacatttgctccaatcttgctaagcgcatgtgtgcatggtcagtacacccagccggcagctctgcttcccgttttccctgtaattgaacattgcaccccaatactctatcagcatgatctgaacaggcttgatcaatgaacaagacaaccttcaaatggaccaacaggataagtggcatggccttcagccagccagggcacctgaccacaggtcatcaatgtctccccagagcctttggactgctgaccactgacctattcaatgccagccttggctctgagacagctgctgacagagtcacctgcaggactttccaaacaccagcccctcagatggcaagtgcagctcaggtgtctttatggaattatctatcagatgctccttatcaccagaaagttgttgggcctgcagctttaggattaagagttcagaaataagttcccatatacacactagggaggggacctgtttcagatgtcagagctccaactcaattttttgacagcaagccaaggtggccttctgaaaggatcactctctccttccactgtcctgccacctgcacaagtgagacctacactcacaagagccagggcttaccttctagcatctggacccaggagatgtttctgagctcccacctgggctgggaagggcacttcctgcccctgccagcagagactctgaggtaggaaagttactaaacacttagagaacctctttaagaaggtaaagagaaatcttcaaggtaaagtgacagcccaaagagaggcccagaaagataaacagaacaggaaggaacaatctccagtggaagatgctgtattggttttctcttgctgttgtaacacatcaggaactgagtgcctttaacacaacacagacgtagggtcttatagttctggacgagataagttggaaataggtttcactgggcagaaaccaaggtgacagcagggtcacactccacacagaggttttgaggagaatccatttccttgcctcttccagctttggtggctgccagcattccttggcttctggccacctcagtccaatctcttcagaggtcctgatactagtgaaggaacaagaggacactaatgttgggctctagagggagaacgcccagggagtttcctgattcttatcatgactagaatccttcctgcccttctcttccttttcctcagccccaggaggagaacgaggagtgagattctggaagattctctttgctgtcattgtactactgtccctattctaacaagggacaaagtgaagacactttctcacttgggacttcctcctagttactagcagattctcctgcgggacaaaaggcagaagtttcccagggtaggcatggtgactcacacctgtaatcccaacactttgagaggctgagaggtggaaggattgcttgaggtcgggagttcgagaccagcttccctccctggctggatgttagagttctgctctttctgcctgctccccactgttcattttgcacttaatggccttgattatgactgagaaattcacaagatctttggaccagctccttacttcaatttaagtccaaacaggaggtgggggcacatagctctcagctgaccccacaacaaatacagctcttagacttctttccctgagccccatgttttatagaaaacaggagtatacacaagtaaatgtatcaaaacactcttctgtattctgctctcaggatccacagttcagcattttctcagaacaacctgcaaccttaaacatctgttctgtgactgacacttttagccccaagaaacatccctttcccacccaactcttgccccatgtcctccaaaccaaaggcagctgtgttggcattccaggcaggtgtgtgctgagaggctgcaacctcagaggccgacagtgctctggaagattgggagggtatgagctgcagaagcctttccgtaagcaaaaagagaaattaattaacttgtcgaatcctccctctcagatagcttgagaacaattgatttctgcataaagaggacgatccaattcttgcttatttggttgcaatgtgtggttctgatgaaactcatgacttgctgcagtattcacaaaaccgcaaacactgtacatggtggctgaagatcatgtagcaataataaccaaaattcatccttttcttaaatgtgtgtgtgtgtgtatatatgtgtgtgtaggtactgtatatgtaacatctgggaagtgtgataccaattcttaacattattgtcatatgagtatagatattgctaccagagccagtgagaagcttaatataagtgatagagattttgtaatgagattcacatattcaatattttttgagaaaattatttattgtatacagtcccattgcattgtttgaacatgtgtataaaatgtatagtccttttatgaacctaaggattgctttactactattgacaatcccagttgctactgtttgctatggtttgaacgtttgtcccctccaaaactcatgttaaaatataatccccagtgtggtagaatacattaagaggtggggcctttaacaggtgattgaacaacaagggctctgccctcatgaatggattaatccattcacggattaatagattaatgagttagtggatccatgggttatcatggagggggagctggtggcaatgtaagaagagaaagggcatcctgagctagaacattagcatgcttgagtccctttgccatgtgataccctgtgccgccccaggactctgcaaagagttcccaacaagaagaaggctcccaccagatgtggcctttttaccttggacttctcagcttccttaaatgtaaaacataaattccttttctttataaattacccagtttcaagtattctgttatcagcaatagaaagcaagctaataccaaaaaaaaaaaaaaaaatggtattgagaagtggggtgttgctgataacagatacctgaaaatgtgtaagcattttcagaagctggaagaatttggaagagcaggctagaaaaagcctagatcctagtgagggcttaaaagacaagaagataagggaaagtttggaactcctcggagatttgttaagtggttgtgaccagaatactggtagaaatatggacagtaaagaccattcaaatgaggtttcacatggaggtggtgaacaaggtattggaaactggagtaaaggccatccttgttgtaaattggcaaagagcttggctgaactgtgtccatgccagagggtgctgtggaaggtggaatttaagagtaacagaagagcatatctggcggaaaaaatttctaaacagcaaaatgctcaggctgcttcatgattacttctaacttcttatggtgaactgctagagaaaagggaaacagagtgaaaaaattggaaaaacgtacagcctggccatgtgggagataataataaaaagtatgttcagaagaagccaaggatgcagcctgttgaccttttgctaaagagattcatatggatagaagggagccaggttctattcctcaagacaatggaagaaagaccctgaaggccatttcagagatctttgaggctgcccctcccatcacaggttcagaggcctaggatggcagaatggtttcaggggacaagcctgaggtcctcatgatggccttgctgctcagagtcacctcagggctctgctcccttcacccccatgcagtgctccttggctaccccagccttggatcaagtggtcccaggtgtggcttgtgctgccgctctagaaggtacaagtccatgtggtgctaattctataggatgacagaaagcagaagctgtggaggccacccagatttcaaaggatggtatagaaagcctggtgacccaggcagagacttgttgcaggggtagagccaccacaaagtccccactagggtaatgcctagtggagccatgggaacacactctcaccagatgtagccccttgaccttggacttcccagcctccagaactctaagaaagaaatttgacttcattataaactgcagtttcaggtattgtgttatgagcaacaaaaagcaaactaagatactgtctcaccagagcagtttgttaaaattggaattaattttgaaaaaataaaagtatctaagaattataatgactcaaaaaaaaatggacttatttgacatagcattaaataaaacatatattatgtgaaaatactgactacaacacaattagcgattctgctggaatgaaagcaggaaaaatattttatggaatatatatatagtatttataaataatgtatgtttttattttattactcatttgaacatcactggattgtcaacagaacacccagatatgtgcaataaaaattgaaatcagtcatctttgatgttttgctgactttcagacctatacaaatcatagccagattttataaagcaagatataagtgtgtgtgtatatatataaagctctctctatagatatgcatatatataaagctatatatgtgtgtgtgtgtgtgccatagatttatatataaacaaacatagcaaaattatttatgtgtatataaagcaggatatatgcaagatatatatatatatatacatacacacatacacaaatatgtatgggtatgtgggtgtgtgtgtatatatataaaaccttactttacatatacatgtatatacataattataaggtgtattcttgaaggtaagaggacagaacttatttactttgatgagggagttgatttttgtctcttgaatatttagacttatggtctatgggctgccattgttctcttcttgagccctttaaatttaagagtggtcctgtccccaggccctgactttgcaacaaacctgcagtacctgattttgtgaaatgcatgtattaaacctaaacaagaggcgcttccttctaaaatatttggttagcagactggctcttgtattctagggcaataatttttggctgaatgggatactcaggtagcttattagattccagtctagacacacctggatgagtgtgtaccaggtgtagacattcctcattcatctgttctaaatccaaaggcagcagctcatgacactttagctttctttttctttctccctttcccaccaattctctatgtccaaactttctgccaccttcatcccaatccatagactatcctgcaaatacactattctcagatgtcacagtttaagagattttgttggatggattgagtaatttttttgtgttgttaaaatccagagggaactgagtggtgcttggattgaatctgctggttgggttatgggaaatcagccattttggaatgggtgctggctgaatgaaggagctctgtagggaatccgggggccctcaacacagggatgggatgggggaaggctgcctgaactcatgccaggctctgactgagcaccaggactgattcagagggaccactccaaaggatcttgctgcagatgtggtctggcctggaaaaatattccagtcccaaatggaatggagtgatcaactctcagggagggacttcagcttgagatggaagacgtgagcttatgccagtggtggctcatgtggtccaggctgaaagaaatgccatggccaagaacacaaacatatgatttcaaaatgacaccagttaccatggagcccctcatacactatgaaagagaagcacagttgactctaatcatcttctacattcacttttctctaccttctatttccctcccaccctacagctgagaatacaaacctgtttcaaaacccacctaagacctccccagcgcaagggctttttttttttttttttaactttctaccaccctttccagagtcctcatttcaaagcccacaaatcagttcaaccactacttgaccttcctaggagtcagggggtagggatggaactgagtgaggacagccagcactctctatggtaggcaagggtggatgaaggcatggaaaaactggttcactgacaaatgtcagcaggtcacaccttcttaaactgaaaggagaaatgagtgggccatttgatcttgcaaatgcctgtagcaggggctcagacccaagcgaactcagcaggtgctgagaatggtatgtaggctccaggcaggctgtggaggtggcacagccctggaggaatggtgacatggcaatgctaagccccagatttatggaggggggcaaccaccacattgggtcctgggacccaaaagacctcacaggattgaaaagatatcaaccatttataatattctcagggattacagctcataccccattctccatgttttggatggggagaagaatttgaataagggggaaggagtgggttatgggagcttgtattctggaagcaggctgatgtggtgtgcagcaactcacttttatagtgagtttgcttaccctgaagttttgggttcactgaatgcagaaacatgatgaccagaccattatagtcaccatttcatggctgctccatgaagtggtgataccagtggtttcctccccaggtctactctttagagacacagtctataaccattttcagaaaggccgctcccatagtccttactaagtggacacatgactcctctcctggccatagccgttgcacagcaatggatacacgactcagtccaggccaagtgtattttttatgtttgaactttgttagcactgggctcaaagatactgtatttgatggtaggagggcactgggtgtcccatgttagagcagccatggttggggatgaatatgtgaggagagaaaaaggttgcagatgggcagagaagcagaggtgagtgactcctggagaggaacctcagtccctgacttccagtccgttgcggggccttggctcctgtcagatacttttctgtccttcttgttgctctgttttatttaagctggtagagtaggccccatctttgcaatgacaagatccctgaatcagacagggaaagggaagcctacagaggagaatgaacttgaccaatgttacacagttaagttagaaccagtatcagatctctgactccaattccagggctctttcccctcaaccatgctgcccccagcttcagtgaaccatgaggagctctcaggatacaagtctcctgactacgacttcttggagttcagagaccatatgtcttgttgattgatctctctccaggatttaacatcatgcttggtgcatagtatgtgctcagtaaatatctgtagaatgaatgaagaatgagtggaggaagaacacagctttaggctcatgatctggtcactctgttcacttaattcagatcagcagggcaggaaagggtgggatgctagctcccatctctagccctgaccttcaggtctttcagcccttcctcactaaattcaagagcatcctctggttccatagcagaagggccttttcccttctccttgggcactgggatggattgcgttatctattgtttactagtttccagttccattgccaggggagggttatgctttccctcctttcaaacttaggtgcacccaagtgacctgctttggacaaagaaatgtgagtggaggtgagatgagtcactactgtgcagaagttttaggagccactgccggacacattttctctttcctctgctgcatattccaaataatggctgctccttccttctgggtcccagagtgagtgaggatggtgctgagaagatcccaggccaacctatggtagacatatgtaaagtcactgagattttctggttgcctgttactgaagcacagcttgcctttttatgactgatccagggcccttaccctctcttgacaggtccctttcccccagccctattcttagaaaccactctgcttatctttgtttgtgttggaggatttcccctgcatcaactccatcctgggggctgccctcctaccccaaca[173 bp omitted]caaaaaaacaaaatttagccaggcatggtggcgggcacctgtagtc[148 bp omitted]atgagaatgtactgtcctggagcagccagcattcactgagccttagtgggtgtgttagtctatattctcctgcttataacagaatacctgaaactggataattaataaagaaaaagaatttgtttcttacagctgtggaggctgggaggtttaaggtcaagggagtacatctggtgggaactttcttgctgatgaggactctgtagagtctcaaggcagcatggggcatcacatggcgaggggtctgagtgcactaacttgctagctcaggtctcttttcctcttcttataaagccaccaattcctcctccatgataacctattcatcctttaattcatgaatggatgagttcattcttgagggtacagcccttatggtccaatcacatgttaaaggccccatctgtcaatactgccacactgggggtaagtttctacatgaactttggaggggacattcgcacaatagcaatgggtatgtaagatggaaaccaagccccttgtgccctttgatacattcacgtgcctgacttttcctctttccatcttcctgattgttactttctctcttctgctcatggaccatcagcctgggcgtatgctgatgctgacctgtaaaactgctgcctatctagccatcatcatccagcacccgtgtcagcacccttgctcttctcctagatagtctttctggaggggaaaaagcagcagtcaaaactaactgtgatggtgacagtggaacttgatggagcataattgttttttgttttttttttgagacggagtctcgctctgtcgcccaggctagagtgcagtggcgctatcttggctcactgcaagctccgcctcccgggttcacgccattctcctgcctca[226 bp omitted]aatatctgacaaaccaaccttatcaacccttcctacccacccaaagatgttgtctcaggcaggttcctcaatttcctgtcactttcaggaaatgaaaagttcttaggtcactgctggtttcaaaatagtatgatttcagtgatacaatgtccagtcttctgcagttcttaaaaaatctgaactctaagtttcttgccatttcccctggaatcttggagtggaacacagctatgcaattgagttcttgagagcaagtttttggagaacagatgggggacatggatgttctgtttgactggtgctatcatgatttgactctggagtcagatggggttagaggatattccaagatgggattcttcctttaggcacattcgtgaggtctttggcgtcccttcccgtgggctccgctgtaccgcacagccccagatgtgggcaatgtattccccatgcagtatcttatgacctttccaccttgactcctattacaagcagagctgcttgggaaggggtctccctgctctagtaggccaccctctcttggcagggacccttaggagtggttctttgtcttgccattgcaggtggcttagcatataatggtccctctttattggaggttttgctttctatggttttggttacccacggtcaaccacagtccaaaaacaggtgagtatggtacaatgagatattttgagagagagagaggccacatttacataacatttattgcagtatattgttatagttgttctgttttattattaattgttaatctcttactgtgcctaatttatgagttaaactttatcataggtatgtataggagtaaacagtgtatttagggtttggtagtatcattggcttcaagcagctgctgaggcttttggaatgtatcccctacagatatagagggactgctgtactcaaagagaagcagatcacactctccaagtggtttccttgaagcctctctgctaggcttgaggtagaggcagtggcaccagataacacctccatataatccaggaacaatgggcttcaaagcactcttctccctcagacttctcaacctccatgttctgtgcctcaccagggtgttgagctagggctgagcttgtttttggtggcttctttcacatatctgcatgtgtaatgtagcatcctaaatgtgggattattattattattatttacctattgtttagctctcactttgactgaggagatgattcttagccaaatcagaagaaaaataacagttaaaatgaagctgtatgctgagagttaaactctgtgctatttgatctgtggtgaaaagggtaaaaaaagaaaaatcacagctgttttggtttattcctgtgctatttcctgtgtttattccaaaagcccattcctctcaactaccattgcctcatttacttttatttgtcagtggattttgatggcgataaactctaatacagatataagcattgtcaaagacagacaaaaatatgtggcagcccagccggctttgcttatgataatttttgaccatcattaaataaaagaaaccacactgctatttgccctggaccaggctgcacagagttttccatttgtaaagcatcttggtagcagatcagtgtgtgcgattcagtgcatctgctctgctgaccttggatttgaggctcacatttgaaagccctgcttgtctgctgtgtctctggtgcctcattgtgcaaggcataaattcccagtgggaacccaccttggaccccagtgaacctcagtttctgctggtctctctttgtgacttttccagggcgttcaaaagtatatttcctgtgcgctgcagagttcatgttttaaatcagaccactggaaatgtaccttatgatgttgaaggaaactcactcagctttgtgtgtgtgtgagacacggtgataggcagatttcatataaatgtgtttgcgtataaattagtgagtgtagaaatgaaaaagcttcaaaagttaaaatcagaggttacaatttatttccacaagcaggaaatccaagaaactttcagaagctgttcatacaagttttaagaatacaaggcacccttgaatcaattaactcatgtatgaatatataagaaagttagaggatatttacaaaccagctctcataaaatttaagttaaatctctacttaatttatatcagataatgctaaagtaaagtttctatctgatccgtatactacaaaaggacaaagagtatttctgttttattgaaggattttaaaattctaaggccaatttacttgtaaccttgagactatgaatatttttagacaatacatttattagaatatttattctgaaaactgttagttaaggttgtaaactttgctataggaggtgaattttacccaccaatcttgagataattaacccattaactgctgcttcactgattcagttccaatgtactcaaacagtgtaacatctacataaattctaatagaaaatctaaactatgtgggaacatagctaaaggcagcctttattgtaaaaagttacatacacaatttttttttttttttgagacggagtctcactctgttgcccaggctggggtgcagtggcgcgatctcggctcactgcaagctccgcctcctgggttcacgccattctcctgcctcagcctccccagcagctgggactacgggcgcctgccaccgcgccctgctaatttttttgtgtttttattttttttattagagatggggtttcaccgtggtctcgatctcctgacctcgtgattcgcctgcctcagcctcccaaagtgctgggatcacagacgtgagccaccaagcccagcccatatacatttttttaaaaagtaactcccacatttaaatttaaaatgcagtgcagaatccttgtttacattatctaagggtctagaatctccaatgcaagatgcttaaagagagaatttatttttgcttcttttcctgggaatctacaaacaagcatataaatgggcctcaagctgaggaggtgtgatggtttagagagaggctggcattttctatccgttggaaattcgctttaactcaatatcatgtactgaaattaatagaagcaggaggcagagaaatcctaggcagacaggggcaggtccccagtgaaaccccaccttcaggccaaaaacagcctgaaatctgtggtccagagtgagaacttctattcctattcgcctgatctctcctgattggctcttcctgaataatgccttcgaaccaattgtatgttgccttttccaatactgcctaaggcccacccttcccccatccagtccctataaagaccccagactcagtcggtagaggggaaacagcctgacttcagggaggagatggcatgactttggggaagagacctcctgactttgggggaagacgacttgcccttcccgttccctctccagcttccctctcctctgagagctgttttcatcactcaatgaaattccccaccctccacatgtgccctaaaacttaaagtataataaaaaaaattctccaccctcaccatccttcaatcatcaagcatgaccttattattcttggatactggacaaaagctcgggactcactgagtgtgggtacccagaaaggctgtcacactggccctttgccattgctggtggagtgcagccaccccatgtgatgggaccaggggccaactgagctgctaacacactgccatccattggggtgtggacagtggaactgaaagaactaattagcacactaacaccccctttggggcttcaggctcacaggcacccttgcctgggcaacattgcattcatgcagtgttggccgtgggttctgcatggagcttgctcctgtgtcagcagagcagccaactagatcccacacttactccctcaaatgctccctcacacaagggcctgagcacagcaggccaagtagacggagtgcccctgctggaagtccagcaaaggggccgagaaaattcctgcatcaaagtttactgtaccaagcccagcaatggacacaggggacccagaggtaaatgacagtagttgttcttcctttctgaaggcagaacacctttatttatgaacacgtatccttattcccaacacagatatctgcataaatttagaaattcatgtgtcaccttagcctatccacagggaaatcaggaatttatggattttccctgattaaagaagcttgagtctggaggaagagacgatccactctcaaacagcaaacatttatttcccacagttctggtggatgggaagtccaaggtcaatgtgctggcaggcctcgtgtctagtgaggctcacttccttgtgtgcggatggccatcttctcactgtgtcctcacatggtgaagagcagagggagaaaacccatggctcctcctctcttatgaggactctagtcccatcaggagggttccatcctcatgacctagtcacctcccagtaccatcatgttggggattgggtttcaacttgggggacacaaacattcagttcatagaaagctgaatgaccactgaggtctctgaaagacaggaggccctaggtaggagtttatgaaatggaacagctgatttgctaggactctttaaatgattctccatgaatccagctgcttgtatcactcttcatctcacccagctctgtggtggaatgtggaagcaaagagaagttgccctggtccctagcttaactgctctttctccacccgaatacactgtgatggatgctttatttgtaaataattcagagcaagcctttggagttgggcaggacacagttcagaattcacctccctgacccctagtgtcttcctctgtaaagcgaaagctggcctcatacagttggtgtaaacatttaatggaggaatgcatttgtacagcacctagacagtggctggcacaaaatacaggcttaatgtaggcttgttgtttttgttgttcttgttgttgtttttgccacgactgctatttgacagtaaggtacaggccctggttctgggcatgaagaagttcactctatgccaactcttaccactgtttgatgatgctaatttttttcccaggcaccccactacattttccaggttgtaaatctgcctctcacccttgtagccagctgcctcttgaacaggaaccaattctctgcaatcaagcccatggagacagcaattccccatccccacatcagctgggtactcacagctttatcgctctccttggttagaattgaaatactttatagcattaatgcttttcagattgaaacctgcagggctggtttttcaatttcccccctgggactgtagcagaacttgtcttccagaagacagactcattgtgaggtctctgacaaggctctaaacccacctggctggctggaatagcaccttctggcacaaaggaacattcattgtctgggtattatttgtctatctgtggtcaatgggctatcagcaagaaagatacccaggaccactactgctaaaggggacagtggggattgggggactgatcacatttattgctcacaatgtaacaggcactgaactaagagctctgtcctcaagtgattctgggagccagggtaagaataaaactacatagtaacttactatggcaattgtggggtacaagtatttataatggcaacagccccttagctcgttctggtgtgttctgggtggatgtctgtgctgagaataagaaaattatcaccattcctcaaacaaacagcagttatggagactgaggaccagggagatcaaaataattcatcccaggttgcacagtaagtggcagagtctgggtgcaaccctaatctgatctgtgtggcacatttgggcaccttctgtctcactgccctgcattccatgtgtgcaaactctgctgtcagcctggattttctttctgactctacatctacataacatgtcttctttccatctcctcctcttcctttgtattgctgttttttaagcctgtgcctgtgggtagaaattgaatctgagctgaggccccacagaacttacattagtgttttttttttcaagatgccaggactctggttttgcctgagggctgagcttgttggagtttctggcacaggcctgcagggccttttccctgtctcactgcaaaacccagcaaaagttcttggggagctgttggtcagatcagcattagagatcactcgtgttgtggtgttattcatttttttaattgatacataatgattgtacatatttctgggcttcatgtgatcttttgatacaggcaaaagatcaaatatgtagggatcaaatcgtggtaattagatttccatcacttcaaacagttatcttgtttttctgttgggatggagatcacttttatgcattcgtgcatactatactatatactaaatgtagactgtatatatagtatgtagtatgtaaattgttgggactcagaaaataatacccaaaatgaagtagcagcctcagaagcagaagcttttctctggttttctcctgtcttcctgcctatcagtcccattttcccctgaggccaaccagagacactagaatccctctttcccaaggagagtcacaggagcagaaccccttttcctgaaagccagctgtaaaacctaaaaatattctatgtaaaaatagaccataaataaatgatctaactgccttgtttgactatgggtcataagaccctcattccagagagggtcctgtcccacatccagaggaaaggaatgaatgctcagagaaggctggaagaatctagacaggccagccttgctgggttttcctaagcagtctattagcattagatcataccctttttagccaatcatatttctacacagctgtccatattttgttgaacttaagtataaagatggacaattttccctgtatgtttgggtcttcattctaaaggctcctgtgttacacattaaataaatttgtatgtcttttctcctcttcaccaatctgctttatgtgtgtgatttctcaggaaacctgtacggggccaaggaccttggccccacaatatgtatactatgtattatgtatgtagtatgtatacctatatatacatatgtggtatacaaagatacactatatcctatactgtatgtgtactatgccataccactttagacgaggaagaaagggaactaatgtttcctaggctctcaatatgcaccaggcacttgactctttatcacactcaatcctaaaacctgtctcttgaggaaagcggggaggcttgggcttcctatcagtgaggcggagactcaaatcccagcttggccacttactggctgtgtggtcttgttgaaattatataacatgttcttcatttgaaaaccggatacttcccaaagaatgagtttgttggccaagtgtgggggcggattaaaagctataaggcatggaaaagtgtttagcgtggtacctggcacacagcaagtgcttaataagtggaaacgactgttatttgtgcctactgcagatgaagagggtacacacaagtcacatattcacggccatctgactcaaatgtagtgaaatggttcaaactcctgacacattataccagatgatgctttttgttgaataacttctaaaactttgtgtctagtaagtttaaactgcatagggattgaaaatctttcagaaaatgacactaagaattcaactactttttttttttaaatcatacaatgaactccctttgtaatgggctacactctagaggatgggtggtcacaaggaaagcacttgcaataaggtaagagctatttctttcctaactaataacttttcacaccccagattgccattaaaacccccaaaggcagggagactgctgctcaactgagcagagaattagcttgttctagcttttggccaagttgcagatccatatgtggcggggcaggtttggagtggatataattcattttcagaaaatcagaccaatctctcttttcattatcccagttctacttctctaattctagtcattttctctctgtggaattgtaccacactgagaaggggaaggaaagagagaagagattcaccaagatgcactgaatgtcttttaggtttaattcctcttccacagtttagtctctctgttttttttttttttttgagacagagtctcactctgtccctcaggctggagtgcagtggtgcaatcatgactcactgcagcctccaactcctgggctcaagtgatcctcccacctcagcctcccaagtagctgagactacaggcatatgctagcatgcctggctaatttaaattttattattatttttttttgtagagacagggttttgctatgttgccaaggctggttttcaactcctgggctcaagcaatcctcctttctcagcctcccaaagtgttgggatgtacagtcttgagccaccatgtcttacccataggtttagtcttctcgaccttcctgggaagtatgcagcattatcttcatatcacagttttaaaaactaaagctcagagaggtaaagttactgacattttaaatgtcacccagacagtaagtggcatgggcaagataaaaatggtaggctctctggctcccaagctcatatttcttcccctgcatcaggagttaggaaatctgctcccaactctggctgtgacattaatttgttatttcagaatcgcttttctctcatgccccatttttattcaaaatgatgggtcaaggaaatttgggtgaggtcagatatggctaatggatttcacccaaaggccaactttgatcaattggtagcagctgcttggagctatgggttgaatgagagtctgaggtcatgtctaggctcattaggaaagagtgctgtgattgatttgtgatgtctgccttgggcatagatatggatgactggaatggttcactgaagtgctgtgattgttgtggttgtcaccacagctcatttcaagatggctgctccacctcagcctgccatctctatttttaagcaagagaaaaaagaaggaaggagaaagggggaaaggagcatatctgcatctggaaagcaaaacattttccagaaattcctagcaaacttcttttatatcccattgaccaaaattgtatgacatagcaacaccttgttaaatgggagtttggagacatacacactttaattgggctcatttctgccactcaaaatgactagaattctgctagtaaagaaatggagtctgaatattgtgcaggaaaccagcagtgtctgcaacatgtaccatccctagactgaatatctttatggtcagttccagccaagtcagccataggataattcagcaaatttacttcttttcgggtacaatgatgaatttttcaatgactgtgcagtccctggttcatgagggatccttaacaggtatttggtgtgagggaacccaggccaatgcaacagtccctagtagtttaatccaggaggacagagtatccaaaagagacatatcctgaagagcaatgctcagaaagccatggagtgacctgagcatactgtgcaaggcttggaagcgatcccatccgggcttgggagagacaggagagggataacatggagagttctgaagaacagggagggttaactttgtttgccaagtgagactccatgatggtcagagctggctgggaggctactgcagcctcctcacattacaaattgggaaacagagttccagtgagacaaagagagctgtttcaagttgcatggcaagttcactacaaaaccagagtagaacccatattctgactcccaggcacagaggatgcagcagtacactgggactcagcatctgccttcatgggctgacactctgggagtatgagtggtaagatactaaagctgattaacatgaagtatttcttgacagctggaagaattatgtgaatgaagagtacgtgagcaaataacaggagatctgtaggtgcgaaacgaatgaaaggataaagtttgagctgagatctaaaatctgtgtgggagttaagcaggtatctacagcagggtcccatagtgtgcatctgtgtgtggtgagtgatgtgcgtgtgtaatgtgcatgtgtatgtgctgtgtgagcacatgtgcatgtttgtggtatgtgtgtgtggtgagaaagtgtccctggcagagggaactgagtctgtatgatgctgcaattctttgtccacctcctcctgacagtgagtctcatgtaagctcagctcttccactctctgtgctgtccttggggctctgaccttcagtgattcct[131 bp omitted]cgaaacaccgtatctactaaaagtataaaaattagccgggtgtggtggtgcacacctgtagttccaactacttgggaggctgaggcaggagaatagcttgaaccagggaggcggaggt[133 bp omitted]cctcaaggttattggtattaggaggtggggcctttgggaggtgagtaggtcctgagggtgaaaccctcataattgggatagccccttataaaagagacctcagggaacttcttcatcctgtctgccatgtaaggttacagcaaaaaaatggcagcctatgagccaggaagcaggctttcaccagacaccaactctgctggcatcttggtcttggtttccagcctctagaatgattggttgtttataagccaccagtctgtggtattctgtttcaggagtccgaacagactagatggtaaggttgccagataaaatacaggatgcagagttacatttgaaattcagatagacaactgctacagggctgctggccttgggcctggaactcctcgctgtcacccacacctggccctctgtgaatcgaggccaaaggagggaagcaggggcaagcaaacacacaaaggccggggggtccagtgtggtgctgagtgagttcctggtctggactcggaggcctgagctctaccgtggctttttcacaccctcgctctgtgactttaggcagagcacctagctgggcttcgggcttcgtgatagaatttgagttttcggatactctctactttattcgttagcacaggaatgccatttttataaataataataataacaatggccattgccactggcttagtgtggcccttacatctttcgctgggtgacctcccatctccagcctcgctccctccatcctgagcaccgtgtgaccctgtgtctccccttccgagccctgcgatggcttcccattaccaccaagccgatgtctgcctcttgggcatggcatccacagcccatgtaagctggcaccaagccaatgtctgcctcttgggcatggcatccacagcccatgtaagctggcgcccgctgatccccttagggtcaccatcttcaccacctattcattttctatcctgtaattcctgaattccctgagcttctcagaatgaatggcacttctgcccctctgggcttttgcctgcatcctatctgcctgaatcgttaaatgaatgaatgaatggggaaaaagagcatgtgtataagccataatggcttccaaaactattatcaccagccttcatcacagaataatttaattggttcctcatgatgggtcatgatgaaggcagccaggagtatcttgggattctggtgtgaagttgcagggacttcttttggggcttaatatgattgatgtgatacaagccctggaaatgaggctgccaaggaaagtccccacctccctcccagcccaccaacccaccatgacacatctgtttgaacaactgggctgcagactgagctcaagcaaaagtcatgtgggaacctggttctagtgcacagagaggtttgacaaattgccatttggacacctgaattcagcctgctgtgcggtaactgaagggatgcttcctggcttcctatctttgactagaaaatgaatgtccaggttaattataagctggaaaaaagattacctgatgcataatgtcctttgtgatgttattaaaagtcctcccaggtagcaggtgtgcggttattatcgtaacaagacaatggggtggcaccaagtgcttctctccttcctcaaagtggaccttgatgacacctcttgcaggaagccttcagtgattacctcttgacttcccattgccctgcactgactcagctcagccctgctgactctcatttccttatttccacgatgggctgtgtgtcaatgtggcccttctcaggatagcactatcaatgaccttactcgtgggccttccgctgggaaataggaggaggctgtgtgtcctcaatgtccccttggtatcactgctgattcactgagctaccttgtgaggggatgcactcatctcaagcccatctcctcttttctaaaatggaggtgagttgctcctgtctgagatctcagggggaattgaaaagagtttggagatcctctgtgaatacttataaaaaaagctcttgcttcaaaactagaagcatgagtgtaaaaaagaaaaatatggatgctgaacacactggaaccaatacatccaaaagaacacagtccttgtcaaagtcgtgcctgtaccagccacacctcatcccctgcccttgcttgcttaccaggctttgagaaacaccttttagctagtttatcagcagataggcaaaaaaacaattttgtgccttggattcatacctttaaaaaaaccctcaaatcccattatccattggatgatttggcccagaaagactgtttctgaaaatcaaattcacctcctggggataaacacttgtcaccactgagataattcaagagcttatctccccataaatttattctcctccctcaacaggcggcctgatatcatagaaggagttttagaatcagaccagaattctgacttcttcacttctctactgggtagcattgggcaagtgactcaacctctctgagcctcgacgtcctctccaagataagatgggaaagagtaactaaacgcacagggtattgatgcacgttaagtgagataatgtctagactgcatagtggatactcatgaagtattagtctctctcttcttcccttcctctgaatctcaccaagctggcccctactgggtagcaataggggcagggcgcctagggtattctaacttatgctatgtttaagtcatcttgtccttattttgctcatccccctcctggcatcttaagtgcagggccttactcatgtctgtatcccttacagtgctagtgtggtgcttggcacatagtaggtgctcaaaaaatctgtttcattgagtcaaatatgtcataggggcccagaccacttttaatagaagaataagccatgcaggacggccatgcaatcagaaggatgccattccagggtaataagtaactattggcagtcattttgtaaacacatttggcttcccagggtgtctgctttgaacctcttagaattctgttaagttctgttgttccttaaaaaaaagattaactctgcctggggtgcagttcttcagctgccctccagatggcggtgttcaacacagatttatctcaaccgctcaagcccctgggaactcaacacaagaaaaaaaaaatctctgttttattatcaatgcattaagaatgaatttatcatcccggctcagcaaaagtctagttattctgtaagaagctttatccctagctaacgtgcagcttaatcagttcagttagatacaaagccagctagggcttttgtcccgtgttcagaatgaataacctagtgctctcagaagtttcagctttcctggcagacaaacctaagaaacttagtttctctccgggatccttgggctgggggttgtggggaaagtgtgggagaaataatatatgcagaaagttctatatcctgaagtgagggggagggatgatggattatcccgcaaaggggttttagtgggataataataacaacagcaaaacaacagcagcagcaactaaggttcactggatgtttaccgcatgccaagcaccactcaaatgcctgactattccaactcatttaatcttcgcacaaccctatgtggcagggactcttgctatcatagttttatggatgatgaaattgaaatctagagagtgagtgaattggacattgtcccatac[134 bp omitted]cttccacctcccaggctcaagcaattctccttcctcagccttctgagtagctgggaacacaggtgcccgccaccatgcctgcctaatttttgtatttttggtagagacggggttttgctatgttgcccaggctggtcttgaactcctgacctcaagtgatcctcctgccttggcttcccaaagtgctgggattacaggggtcagccaccacacctggcctggaagctatggtcttaactgccaggctatgctgcctcccctgggtggcagaccacaagtgggctgaggatatatactccatacttctgaacatcttgaaccaccaatgcccaccccattgtagccacagtgttccctagcccacaagcaagagcaagaagtagaaaagcccagtgcaaacccatccctgtcttggggaaacagtgcaaagcacacactacacctactccaggtgtaataatataggttgttggaagaacacccaagttttacagccaaagggacctgagtttgaatccctatccagtcaatttcttggatgagttacttaacaccctagaatctcaaatagtaggtgcagtccaaaggtgggaaaatccggcagttgcaaactctcaggaatcagcagttatgtggcgggcactgtccccagaacccaggtaccaggagtcagctcaggttctgctcccaggcagtggaggactctgagcagggaaggcgggagggcccttcagggagcaagacctggtctgccagggtggtcattgacttaacagtgaagtgcttttgtgtcactcagcctagatatgactcttgggctcttctctttatcagccatatgacccaggccaagttgtttagctgctctgagcctcagttctctcatccataaaatggatgtgataagttaatgtgtgtgaacagcttggcacagggccgggctcaggccatgtgaggatcgggggtaatgagcatgcagaggcatgatgatgaatcgtatcctgaaaggaaactcaaggcatacagagggtcgccatcactgggttggtgtggagggggatgggggtggttcccttatcctaaacctttctcccagccctgcttcccaaagtgcccgcgtttaatgtttgctaacagccacgcagcttaatcttcactgcctgctgctttcctgttagaaatgaccaaagctttgcccctgtggccactggaccatgctaaagagcccgagacgcctctccacagcatttctgagtggctggctacgtgtctttttgttttgctcaggtgtctgtgtgtgcatttcttggaattgctttctggaacactaagatcaatattgtctctaacattggtcttgagagatgctggggacagcgcaggatgatggagtgggtgggattgggaggcagacatagaggggtgaggtagggtgaacagtcacttccatcgagcccattcaccaaaagtggatccttgccaccagtgttgtagtaacagtaatgcatttggacatgatagtcatgaaaaccatgatggaaaggctttcaaggacacagagcgaacacaggagtcagccctgctccacatagaattaaagcatctgaagtcagctgtgagacaaatggagaaggtggcccttgaatactgctcctttcccccaccgctgacagtctttgctgtccccacctccccttcctgatttcccagtctcccacataggagcaaggggctttccatggacccagccttaaagacataataaggcatccttgattcttcctttaccttcctataacaccctgttcgtcagaaattccttttgactccacttgtagatataacttgagtgcctcccatttcttcttctctggcccagctcaagccaccggtggctctcttatagatttctgtaggaacctcccctgcatggtctccctgcctccaatctggcctcttgcaatgcattctcccacagcaggcagactggcttttatatattccagatagaagttctttgtctgatcggtggtttgcagatattttctcccagtctgaagcttatcttttcaaccagggtcttttgtagagcaaacatttttaattttaatgaagtccaatttatacattttttcttttacagataatacttttgtgtatgtccaaaaactctgcctagccctcagtcctggggcctttatcttatttttttcccctataagcttcaaagtttaacatttttacatttacatctgtggtcctctttgaattagtttttgtaaagtataaggtttagattgaagttccttttttttttttttgcccattgctcaatttccatttgttaaaaagattatcctttctgcattgtagagtgatcttttaaaaatataagctggccaggcatggtggctcacacctgtaattccagcactttgggaggccgaggcagactctttgagctcaggagttggagaccagcctggccaacatagcgaaaccttgtctctactaaaaaacacaaaaaattagctgggcttggcggcatatgcctgtggtcccagctacttgggaggcttaggtgagagggttgcctgagcctgggaagtcgaggctgcactgagctgagatcataccactgcactcagcctgggtgacaaagcaaggccctgccactcccactactcccccaccaaaagaaataaaaatatgagctgatcatggacctcctttgcttaaaacccttcagtgccttcctacatgctgagaagaacatccaaacaagcctattctcaggctccggccagcccccctgaccttatctcctcctctccgtcccacttgttctagctacagaggtctccttgctctccttagaacacccaaaacttcctcgcctcagaatttttgcacctgctgttctctctgcctggaaggctcctgggcttctcccatggctggtcccttcttatccatcagacccaagagcaaatgtcccctcagcagattcctaagcaccctgcttacattactccttttcaccccatcactttccatcaccacactgtgcagtttccttcttggcacccatggctagcagaaatgatctcacttacctgcttaccagttgattgttcaccttcacctgaatctaagctatgcagaggcaaggcactaaccatctccttcaccgttgtggttaatagctcatgctctggaatcagacagcctaggttcaaatcatccctttgacacttactaatcctggtgagatcttggccatgtaacataacctctccatgcctcagtggcatcctctgtaaaatggagatagtgattgcacttacatcattggtcctaacagggactaaaggaattcatgcatgtaaattcagtagagtgtctggcatatgttagatgctcaaagcatttgcgatattaggactactgttgttggtgaataaatgagcattggcagtggcctttaaactgcactgcagagcagagctccagggttgcctgccacatggtagatgaacacttaggtggtgtctgggccacccatccctaccttaatcagactggctctcctgtcatctgtctatattttggatttccatgtttgttttcagaataggatattgctgctaatataagtttgaaaaaacatgaatgaaggggaatggactttcccatggaaacccctggattcttagtcccaactccagttgtaatttttggcaaatcatgtgcccactttagacctcagttatccacctgatgaaatttagctggatagtcagcaaggtctcttccatttaggatgctccatttatcatgttccattattctaagtgaggaaccgactttctacgccataccgtctccagagatgcccttggcaggaacttggcagcgactctttacctgagagcccagagcaccaaaggtacagctctgcctgtgggtggaatatggtgcaaccaagctcaggggggcctggagtctggcattaggagactgaagttttgtgaggttggggggtcattgagcactctaagtgctgtgaagttagggagccctggaatcagccctggctccaccactcattaggttaaaggccttgggccaggtatctcatcatacccagtcctgttttttcatctgaaaaattaatatgtatatatgggtttgatgagggcattcagggagataatacatgggtagttctggcaatgcctggcatgtacgcggaaatacaaactcttaaacttactgaaatagagtctttagaggagaagcctaggaatttgcattttgaacaatctccctacccctcctccctcaagtgaatgtgatggtgaaccaagcttcagaaacactaatctatttcatgaccattgctacctcctaggcaatgctgttcaatagaaatattctctgagctacatatgtaatttaaattttccagaagcccaaattaaaaaggaaagagatgtaaaaagatgaaatgaattttagtaatatatttaatttaatgcaatacatcattgcaacaaaattataattttgtcatgtaatctgtatcaaaaaattactaatgaagatattttacatttttttcatacttagtccaaaatctggtttgtattttatacctatagcacttcttgattcccatgaaccacatgtccagtgctcaagagccacatgtagctgagagctgttttgtgcagtgcaggtctagagactgccccagaaagctggggtcagacatgcagcccagacagtagtgaagtgtgcaggaccttatgacatgccttttggggaacaattttacccgtactttatcattttttttccttgcctttgtccccttgaaacaagctcactaacagcagattctacatatattgtgtctgattagtgctttgcatgttgttatgagctgaatcacattcccccaaaaattcctatgttgaagtcctaactcccagggcttcagaatattactatatttggagatagggtctttaagaagtaatcaaggttaaaaaaaaaatgagggcattagggtggacctaatccaatatgactggtgtccttataggaagaggagattagggtacagacacacaaggaaggaaaatgatgtgaagatgaagaaagaagatggccatctacaagccaagaagagaggccccaggagaaaccaaccctgccgacaccttgaattcagatttccagcctctggaactgtgaggaaatcaatttctgtagtttaagccactcagtctgtattacttggttatggcagccctagcaatctcatttgcattctgtttgcatcatctctgcaatgcagttacaacaactccattttatagatgaagacactgaggcttagagaggttacataatcttcccaagtcatggctggaatgtggctgaaccaggattcaaattcaggtctaccttcaccttgctgttgagccaatgcccttactcctaaccactaatgcctatatttttcatccactttccttcccaacaattttttaatagtaatctttttgtgaatcacagatgtgggttctagtcacatgtgattttgaaagtggtacttgagtcatcaatattctcacttatgaaatgaaatggtcaaatggtccaatggtcaaacggttgctgaaagtcctttcaaattactgttctatgagaaattccaaattgcaggggccagagagaatgatgactccaacatagcacagaccttcaggaagatggcaagaccaggggaggcagaagattttgctactaaagcaagtgcattcaaactaccacataggatcccttgaactggaatctgcgtcggctgcttcagagaccagcacaggtttactgctatctgctaagtgctgctgcaatgtcattactatgttccattctcccagtgtggaaactgagtctcagggagagtttaaggagcttggcaagctcacgcagctggaagtaagagaagaggctggggtttggacacaagcctttcagctttctcatctgtgccccccccttgatcatgttggcataaaccaggcagagtaacaggctgtgggcaaacttgtttgactaactggcaggttcaagggccataaatgtgaccctgaaatagaaggtgagccctgagttaccctttctggtaatggacagggacccagcacactaggtgatatctcagacctcttccctctgggattccaagatagagcaggtagaggagtgggaagggtgaccttgagctccaagtacaagtcgagattcccagacttcttgatgtcaagaagtagtaaatgatgaattaaaaaaaagaaaaactgaaggtggcattggggaccaactttttattttgcccttaaaaacttactatctgctatcaccattattttacatataaaggacatttttaatacccacctaattaaaaatattttaatcttagagtaaagaatggctttttaaatttaataaatttcattttatgaaaattcactactctttccttatttttccctttttactgcagtcaaaggaaatcttcattactcactgtcagcaattcatgagactcctggcccctggccaccccatcatgtgtcctaagccctgggtcattttgctgtagaggcagtgaaagtcagggttgggaagcaggcagtgttgatggcttatctctcttgggtactacaagtcacccctcaggttcagctgaaaatcgaagaaaaatagacaaagggcattttgcatgaagagtctgagtcagtgagaagggtgagctgcagtacatcatcaaaggtgggctaattttattcctctcaagcacatactttcatactgtgatacaaactaatttagcaaagaattgctaattagatgtctttgggaaatcaagcttcttggatggatgagactgatttacagatactcttctcattgcatacctgctaatgggtacttccaaagtacttgtggggagtccaggagagaaggggcctatggtacaggagcacagtacggctctcacagcgtgctcacaaaaggcagtttctccttttaaacacttgctatctcccattgcaacaattatttccaaagttgcctgaatgaaaggtgaactgcattctgcaaggccccagaggtcccagagctattactacctttttggaggcagtctttgttactggataaagtggtatctgtggctgtagaggctccacctgctgaagaaggtgtgtaacctgggaccagacctgtattcacacattccccaggagggaagatggaatatctagtgttcccttcagagcagagctgataggagaatattcagatgtaataaaaggataaattagagcgtgaagccatatgttaccaaaggatccaatacacttattgggtctcaggaaaaggagaagaaaatacatatttttgagcctctagaaggtatcatgttctctaacaggtgccaaggaatgaaagaaaaattgagcaaaggtgtagccctcaaaatatgtcccagcagcatgtaggggagggtgacaagtaaaacagtggcaaggttcactgttgtatcagtagtttctgcacagtgtttgtgacaatacaagaggagctccactgagcacctgggaggtaggtgtgtgatatggtttgggtctgtgtgcccatccaaatcgcatgttcaattgtaatcctcagtgttggaggtggggcctggtaggaggtgattggattatgggggtggatttttcattagtggtttaggaccaaacccttgatgctattctcctgatagtgagttctcacaagatctggttgtttaaaagtaaaactccaaaccataaaaaccctagaagaaaacgtaggcaatactattcaggacataggcatgggcaaagacttcatgacaaaaacaccaaaagcaattgcaacaaaagccaaaattgacaaatgggatctaattaaactaaagagcttctgcacagcaaaagaaactatcatcagagtgaacaggcaacctacagaatgggacaaaattttgcaatctacccatctgacaaaggtctaattatccagaatttaaaaggaacataaacatatttacaagaaaaaaaaaccccattaaaagtgggcaaagaatatgaacagacacttctcaaaagaagacatttacatggccaacaaacatgaaaaaaagctcaacatcactcatcatcagagaaatgcaaatcaaaaccacaatgagataccatctcatgccgacagaatggtgattattaaaaagtcaggaaaaaatagatgctggagagatggtggagaaataggaatgcttttacactgttggtgggaatgtaaattagttcaaccagagtggaagacagtatggcgattcctcaaggatctagaaccagaaataccatttgacccagcaatctcattactggttatataccttaaggaatataaatcgttctactataaagactcatggacgcatatgttcattgcaacactttacaatagcaaagacttggaaccaacccaaatacccatcgacgatagattggataaagacaatgtggtacatatacaccatggattactatgcagccataaaaaggaatgagatcatgtcctttgcagggacatggatgaaaccggaagccatcatcctcagcaaactaacacaggaacagaaaaccaaacattgcatgttctcactcataagtgggaagtgaacattgagaacgcatagatgtagagaggggaacaacacacaccagggcctgttgggggggttgggaattgaggggagagaacttagatgatggatcaataggtgcagcaaaccaccatgacacacgtatacctatgtaacaaacttgcacattctgcacatgtatcccatttatttttttgaagaaataaagaaaaaaagtgtgtaacaccttcccatctctggctgctcttgcagtgtaagacatgcctgccccgttcagcttctgccatgattataacctttctgaggccttcccagaagtcaaactgatgccagcatcatgcttcctgtacagcctgtggaatggtgagccaattaaacctattttctttataaattacccaatctcaggtatttctttatagcattgtgagaatggattaatacaagatatctcacaggagaaggaacatttaataatgattgacatttgctgattcctcactgtggtccagacatcctgataagcacttttataaacattgttttcctcaattctcccaacaacaaactacaatccccattttatagacaaggaaacaggctttatttgtgagatttagcagagaatcatggtcacacacacacacacacacacacacacacacacacacacgtgcagcatttcagctgctatggggatccctaacttgtatgggctccccctctgaagcccttggaaaaccctagcactgatgttgtatattttgataacatttgcaagctattttactggcaatcagtattgtctttttccaccatgacttctcttctgtcataatttcctttgtgtgtgtgtgtattgagtgatttgagaagtcttggcatctggctaaggttgtgttttagatacatttgttttgggttgaataggatatgtttatatggattttggtcacttctgtgcgtagttaaatgattgctgactattctggtgtaggagtggcttccaggaatactcccaccacctagcactgcagttcactgggtgtggtgatgtcaagtccagggcccaggtcatggagttatatgaataagtcctatagcatctagtgcagaatgacgtgggtcatagaggagaaacaaagtgggaaatgtactgagccagaagctctgtatggaaaattcttccaatgatgagacatggaaagttgtataatgaagacatttttcattgatgcctaatcaaaatagaagtttccttttttcagcaacgtataatactaatgtgggcattaatatgtttgtactatacatttattttacttttcaaatggcattttgcaagatagaattcatgaaaattcttgaatttgtaagacctggacacatagcagtataataaaaaatggttacatctgtgcttgatgcatcccaactctcaataatatatttttttgaccaactatgctagacaaaagactgagtcatatttctattcactctctagaaaattgttatcacaaaattgttttcctatgaagaagcaatctcagaatatgccacccaaaaacatagaaaaaatgtattatagaggtgggtcaagcagctaattaataaaaatattcttatttttctagatattgtgtttgcagtattggttagctattttaaaatttgcagcctcttgtgatattttctcattctcactttcatttacacttaattttgtatattttatgagccaattccagtctgttcatgatctttgcttcctgactccagccctacagactttagctttccttaggcagcccccatagttgcataagctgatttattataataaatcacacacatacacacacacacatctcagatatacattacatctatcatctctatcatctcttattgggttctgcttctctgattgagctctgactgataaagatgatgatgacgatctaacaacaataacaatattagaatctcatactgattgagaatttatcatgtaccagacatgatgcttaacacttttcaggcattagtcttacttactctgctcaactccattaggcagatgctatattatccctttctatgggtgaaaaaaacagaggcacagagaggctgagcaagtgatcatatagccagtcagcctcagccagaattgcaacccatgtctccctggcctgtgccctggactagcccagggtgtagcatgagtgacagcactggatgggacccctcatgctacgtgagggaaacacaagcagattccaccctttggctgctcaaagtcaggagtcacgaacaatgagatggaagaagccatgaggatttatgtcaaagtcatagtcactctgtgtggaagccttcttgtgggtgaggtaggcaggcaagaatcctcataaacagaacagagaacatagcatgtcagagaaggaaggcactctgagatcggctagttcatctgccatgggaaatatgagcaaattgaagccctgcagagatatggagaagcatcagggtgtaaataggctatcaggttggtaatgccacatggtatagattccttttgctgtagaagtctcgccatgaccctggaccccattgggcaggggaactggattccaacaaggtctgccctccaaaaaattcagtacagtagccaagggttagtatgaaatttgagggagagacaaatttgacacattaatatttgacatttcacaggcaggaagtagtgagtccccaaacctgtatataacaacatagttactgcaaggctgaggaggtggcctttggctccagatgtgttgttgattatgccaatggcaaagaaagcatggtggctttcatgcaaataatggtaatattgagaatggaaataataatagtactaataatcatttatttctttaaagtgctataatagttcataaatggctttttacatattttcatgtttttatttattttattttattttaagacaagatctcactccctcacccaggctggaatgcagtggcacaatctcagctcactgcagcctccaactcctgggctcaggcgatcctcccaccttagcctcccgagtagctgggactgtagttgtgcaccaccatgcctggctcatttttttgtattttctgtagagacggggtctcgtcacgttgcccaggtttgtctcgaatttctgggttcaagtgatccacctgcttggcctcccaaagtgctgtcattacaggcatgagccaccacgcctggcctatttacatgtttaataggatgttgtctgtcactactattattcccattacacaaatgagagtattgaggtccactaagcaattggtcctaggtaacccagtgggtagtggtggagctggtcttggccttcaggtcccacttaactccattctccactgttcagtgccacctgctacttccaagggctgggaacatgtctctggacaatgaccaggcaagggtgatagtcccccattccctccactcccggcttctctttttctttgtgaacaatagaatatgtagctatttctcattgggggtggtggaggggggaggtgaggagcagctggagaaccggctgacttccaggctgagagatgatgatgagtttgcaccagtggcggtcaaaatacagagattaattacactcaacccaagaagtgggtatttatgggctgtcagtcagaagaaaatattttgaagccaaaatttgaaaactgtcacaactggtgttctgaattcgtagatatcttgggtgccttgtaatgccttctatttttcatttagaaaaaagaaaatacctgtctttgaaaatcacagtggcttatgaagtggtcagactgagtttcagttttgagctctctaggtgccgtgggccgagtggctggcatgtaacacattcaggcagagatgctccatgaggaacttcttaaaatatggtgcagagaacataggctcaagagcttgacttgaggtcctctcctttccagccctgagacctttggcaaattcatctccatgcacttgttttcttcacctgtaaaatgggatccagatcaacaccctctccaaatggccaaggggattaagtgagattcattcatccactgcccagaacaggactttgactaatgttttagtcctacctgtagcatttgaagtaattaacaaaatgcttttcaaacagtacctgttagataaccctgtgtggaaagaatgaatgaaaaataaggggagcctttaactgaaatgttgaggctgcttccctaacattgaccctaaaatctgtctagtctagcctgttttacactttttgctgggtaagaaatatctatagtaattcataggttttctaataaatagccatgcacatataacatttgtttataggtgtaaaaatgacaaatacttgcagagcactttccaaaacttaatctgtgttattttatcttatcctcacaataatgcaatgagctgcagatactagcactgctgctgctgctacttctgctaaacatttgcactaactggggatctgctgtgggccaacctctgtacttactaagtgctgtgtgtacttcatttacggtgaattcctcagcgcaggctatcaacagcatttttcagagccaagaatcaaactcaagccaatctgagaccatagccattgttgcaaagcaagggttattgtctcattatgtagatgaggaaacacactaaaaggagttgcaagacttgcttcaaatgtcctatcttgtaggaggtaggatctggagccaaatccatgtattcttgcttcagattgtaagcttctaccatgtgcctgtttctcaacctggtgatggtgaaaagaaggacgtggtcagtctgctttcattgaatgcttctatctaccaagtccgtgccaaacagctaataatatacttcgtcatttgatctacccaaacacaatgatatacatgttcacagaaagatgcttgagggttcagtctccggaatgttaatggctattatctccaggtggtatggtaggatttcagacgatgatggtgacgatgattttcttcatcattttacatgtggtttttgaaaacagagacagtaaaacttaagagcacacactctaactgccttttcttggaggtgttatttatcctgactttctggctgaggaaaattaggctaagagagagacagtgaatggtctattcaaaattaacttgcaaagctctagctcacccattccactgagctgcctcctaggagccccaatttgcaggacaaaagtgcagtgtcctgagtgactttatagtctcctccatgacagagggcatggtttcttgggccctaaatttgtacctagattcacatggtagtggggcctcaggctttcccacaaggacaggctgaacaggtcaaggggctacttcctaaatgctgggctgcagctgatcgggtgtgttgtgtgttacaaaggcccctcagggtgtaaaatgcccttcctgacctcacattcttcatcagtcattgcctgggaagatggaggtggtgatgctgcagagagggcctgggaaccattggtgaatgggtgagcatgtagtatggatgaattgtgggtcaggggtgatgcacatctcatttcaaacactgtagtgtgggggttgtagagaaggaggtatgtgactacctgttagacctgttcttttgttttggaaatttgatgctatgtccaaaattcaaaaatttagatgactcagtagaaagttcatggtgaaaaatgacatcttccaggtaatattgggtgagccctccgaggccattaaattccagccttgtccacagagacaaacaagccttctatcacagtcaccaccagacctgttgatatagcatatttattaaaacataaaatcagctcattgccttacagccttttatgatcgagatcaaaatgaccagcagcaggtagcacagtttagtagagaaaacaccaggactggggcctggttctagtccttagctctgtctctaacaagcagtatatctttgaataagacacttgggccctctgagaccccttatctgtaagataagaaaatgagccacattatctgaatgacctataaatacaatggaattcaattcaagtctgcatttattaggcatccacttgtgtccagcactgtatcatggtaatcagagcaaagctggagattgtaggagcttgattctgtgataccacaatgaacttctctacattacagagaaaccatgaagactgtctgtactgaatggtttgtgcaatgctcagatgttcctttaggtctgaggcacctattccctcagttaaggaagtgttctcaccaacactactcatcctacaccatgactggttgatgctagggtccaaaggcccagcccttcccttggattaggaacatctttgaaaatctccttcaactccagagtcctgcatgggaaagttgaggtctaactgcattgcagtttaacttctctctttgccccatcctttttgccttactccttcacagaagcccttgttcctgagagcatgcccctccaaccttgccatgtgcaagtctctcagagtctatttcctggaggaactcaaacattgacatgaaatctcatggcctttggaaaaaaggggtccctccagtgtcaaccttcccctactcccatcccttctgtccactgagcccatatccactcagagtggttctgagcatacctgttgcccatcccagttcctgggatacagacacagaaataccttctgtggtttcaggggagtaatgtgatgatccatgcattgatagatatctctcataaatatggcccaggggccctgttaatctttagttttgaaagggaaactaagaaagcctaagttcttgctttcttgatatcaaagacctgcaatcagtagcacttcaatgggagcaaactccctggggccagaacttatccaggtagctggaagaccaactcttccccttgaagttaaacaacaacaaaaaaagaggtctgagttgagcacatggcagaaattcatgaatacttgttgaatctgggagaattccagtagattatcaacactgttaagatgaggctttgtgagaggttgactgcatatgcctttactgtaaatctccatgactgtgagggcattttccacttaataggccaagtgccacaatcacagtggcttcttcttgcccttggtttagaaaaccataattgtgtcggaggacagactcccccaccttccttgtagaccaccaatgtgtttagtacatactttgagaaaattctcagttgagttcaaggctctgtgctccctgggaaacatggaatacacaccagagtgccacagaatggaaaacacataatgctaagcacatctgggtcagatcccaaatctagtatctgccagtttgtgtccttgaacaagtcattttgctcctcaggattcttgtttgcttattgataaaaataaggctaattcttaacttccaaggattttgttggaattagaaataatattacatgcttaatagcaggttggatctcaaagctagttattattagtagtaataataatacctagataatactgatattacaaaggaaatgaacattagctagcctgtataatgtaaaggctaaaactgtagtgaacactgactctatatcatggtcaactttaaatattatgtaacaacagacactcacacatacatttccaagatccatctgatacttgaaaatgatgctgccagaaacgctctttccctttagtcattggccttcactcatagcctggcctatgcttgccttgaatgacaagtatgaagtgagggaaaaaggtatttctgccatacagagaaacttggggctggtaggagattaagggatgggaaccctgagctccaggcttggctcactcatgtactaaaggtgtgatcttgtgcaaatcatttaatctattgagtctcagtttcctccttcatttatttattcattcaaccaacatttattatacatagagactcaagtatggtgtctcccttatgcaagaaccatgcagtaggtgagctggaagtaagcaaagtggaaatgctgacatgttcagtgcatgttatggggcatgcagatccaggtgagagccatgagagtggagccttttctctctcactcagtgccatagtttcacccctgacgcagtgcccagtacatcaatatgttcaacaaacaaatgaagatgaaattctgctgcatagatcagggaaagttttagagtgaaggtaacacttgagctgggtcttacatgatgagcaagaagaggttagaaagagacagtaggagtggaccctccaggcagaagtagagctgtgcaaagtcctggagctgagacaaacctctgagatgtcagggaaacgtctggcatgactagcgaggagtgtgcacagggaagaatgaaatcccttggcggcactgtgagaatgaaatgagttagtaatgcagaatggctgggggaaataggttaggcggtattattgcatcctgctaccttgatgtataaatgttatatatttatcttataattgttgttgtcattactttagatttcagtctaattttgttggtccatgattgatcattagtaaataaatatgcatgttgatgtgaagcttggctctgtgtacagcattattgatgggttcattcactggtccaacagatattttattctgataaatgttaattgctgctcagagtgcctgaccaaggtaatttgctgaagcgtgagtttgcgcttccctggttctatttgtctgcagacagaaggctgtttggaggactgaaatgtgggcatgttccgcgtttgtactcttggcctttggggacactgctcagtgcttgcagcagggaaggaggtggggtttctcaatcacacctgagtgcttcttcctacaacttcagcatcctatggcttcctccttctcatcactcacaggactagcccccacacataggctggctcagctgtacagagcctggcgagagagggatcatcgcagtgtgcaaaggaggaagtggggagaggtgatggcagaggtggcagctgaggagagagggctctaaggagcagatgggaaacaggatgggaaaaggagatgcagctttcatcagtgccggagggaagaaaatgaagtgggaaaaggatgagagaaactaaaggactagcgagatgaggaggtaaagggagagaagtaggtattggaacaaaaattgaaaagggcaagaaagttggggcaggaggaggaagtaggaaagggagacaaatgggatgagataattgtatagaaagattccttagagcaggtgtttatgcagagattctgggctcaggaagctttgctgcgtggaagggtagagaatgtctaagaccactagcttgccagcctccactgattccccaaagtgaggaggtgtcaggtgtcaaaatattcagtggtgacgcatgaattagcagagatcaatttgtgtttaagaaatcttgatggaacagcccaaagcacagatcaaagccatcaagcgaatgagactgttcatccaattagcacaaatccagcacctggctctgtggagcgcagcagctctcaggctggcatcttgatggggagtagggttggctttgcttattcacttgtctgtttgtgtgttctgtgccgatggaggaaatcatcttcaggaatgtgctgcaggctgtgcttaaataaaggtcatcacatccctggtttttcaataatcatgaggcatttaatgtgaaatgagctcattccccagctcaatttaggcagcatttccactatctaatgcaaatcaatgatgactctttggaagggatcagggccaccagcaatttctgctgtttgcaatggtcaggggaaaatgccagccctgggctggggagattgagcctggcacagctgtgggccctggagactacattaggtgggttcctgagcatacaaaccacagcaattgggagctgggactgcgaagtctgtgtgggacccagccatctctgtgtccctggagctgcatcctttcttccaggcctcacttctggatttctgtccagaggccccagtggggtaggagttctgtcctaaatagaattgacaaatgccttgacctccaacttagttctttctgctctttcttctttgtaagtggacttgttacctttacgcctagggctaggtcagagcccttgtctaactcagagatatatttgtgtaatcagttccttccttccttccttccttcttctctttccttccttcccttccttccatcaatccgtttttcctccctgccccttccctttcttcctctttccctccctccctgccttccattttccctccctctctgtttcctctctttctctttctttctttctttctttcttcctttctttctttctttctttctttcttttctttctttctttctttctttcttctttctttctttctttctttctttctttctttctttctttctttctttccttctttctttctttcttactttctttctttctttccttctttcttctttcttccacaagctttcaaaacattttatttcctgcttttatttttctccaaaatgccaacctagtgcagtgatcccagtgtgcacctgggtaaggtttctgggatcagggcatatgagataatgtagttgcttcttggactaaatcctagtccaagaggtaggctgacacctctgctctgtcatgaagaaaacacaagccacatctgccagtctcagggtgactatagctaccatatattgttgtataggttgtgtaacgaacaacccaagagggtactctttacatagatgataatgtgaatggtgctccctaaggttgggcagtatacaacctgcacggccaaccactgcagactatctgggtccccacaaatactgcggccatgctttggttgtactaagtacaaaacagggcattgaataaacagtttctgttctaaaattggctctcactaggtgcttccttattatcaccatgcaaatgtcctggactctggatcctgtatatagagacctttgagacctcctgcactttatgaccttagctggtcctccatgctctattacctgcttgacctggacataccccattgcctcttcagctgcatctgcatctcaggccttgacctgtatgtttgtggttataattcctggtcagacccatccaagctcttagaccaggacaatctgtcagctttgccagtctgcttccgatttcctaaagaagttcaacttggaatgcacacccccttttgcacaggaattgtgggcatcagatcttgctcatacaatatcagtcacaccttcaggagggcagagttaggtttgggaccaagacctatatgactccagagtttctgtgcttttaccttgcatacacacctgcctttggtgtgtacgaattcccaaaaaagttgcacaaagaacagacactgataccctacagaagagatgagaaataaccctttctaactgctttatccacttacggaggagcagatccattagaaagtcatttctcccacttccctgacaatcataataatcaaggggtagttgttaaacatgtaaattccagggaccactcacacccacagtatcagaatttctagggggatgatcctgggaaatggtgtcaatggtgtctttaaaacacattgcaggagattcctattattataaaaatgtaggaaactttggacacagtattatagtgatagcaatagatgacctcatgctaacagccattccaagtgttttccatgcagtcaattttttatcctgctatcaacttttcaaggtgggtattattatcattaccactgtatggatggagaagggatgcacagagacattaagaaactttcttaatgtcacacagctaatctagtctgactctagaatcagtcttttaactaccatgctgtgctacctctcaaagaaaagggtttattctgtcaacttcatgcacaggaagaacaagcagtcagttgagtgctgagattaaaaaccctctaggaaaggagatttgcaatacactagaagtggctttgaagtccacttcgtcagaaagctttggtgtccatcaaaatgtggcctggagaactagacttgaagctggtatcattcactcacacctctggtgaagaaaggaattagtgatagattttcttgggagaaaggagaggaaggaaaatgagggttcatcgtgtgatggtaggaggaagaagtcgccatcaagtgagaaaacatcagacattttgcaggagagcccgctgggactaaaatggatcaccaggctttcgtttttcacctcacaaactctacccacacacctttgctctctgctgctccagcttctaaataccctgcttgattgtctgatctgacatgacctgtccttcctcccaatccctgttttgacactttttatgacatttatggtttgggtggagtcagggaggtatggattcaaagtctgccacttgatatctgagggaccctgggtgagttaccatctttaagcttcaatcctcttcaataaaacaggggtaagaaacatatagtatacatcaaaatgctgatgtaaggatgaaaggaaataatacattcgagacgcttagcatagtgtctcaacacgttaatcacccagtgaacagttgctcttctgttgttattagccagaaccttcaatgtccaatatgatagcacctggttaaatatgactgtttgaacttaaacttagattgattaaaagtaagtaaaatctaaaatctagttcctcatttacagggctcaatacccacaggtgcctagtgcctactgtaccggacagcacagacagaaagcaacttgtttaactttccatcatcgcagagtgtagttggctagaactggacgagagggaggtatggaccacatattattcaaactattctctaaaatattgtttctctcaggctaattggtaaaaattggacagctgttagttccctgggaaagacatggagagaaggtgttttgattttctagataagtcagacgtatatagtcatgcactgtataacaatgttttggtcaatgacagactgcatatacgacagtggtcccacaaggctgcaatgccatatttttattgtaccttttctatgtttagatatgttttgatacacaaatacttaccattgtgctacagttgcctagtgtattcagtacagtaacatgctgtataggtttgtagcctagaaacataggctgtcccatatagcctaggtgcgtagtgagctgtaccacctaagtttgtgtcagtagactctatgataattacacagtgatgaaatcgcccaatgatacatttctcagaacgtatttctgttgttaagcgatgtgtggctgtattttaaaaacacaaagtaaaaggatagtgaaatttgagaacacagaaaaggttgaccttccgaattgcctgccactccctgcccacgtggaaggtggaccgagagtcatctccaggcagtgtgtggaacctgctttgaaaatagtcctgaacctgctccaacaacagaaatacataacatagcaactcccagtctgccctgaattgtttctcaatatttgctttcttcctggttttaaacagtaactgcttcagtcaggagaatcctctagaaacagaaggaggaacaaaaagaacagttaaatgaaaactttgtttttgtctgccgttggcctagaggccagggacatgctgttactgactcttcagcttctctgctcattgctcctgccaaccttccctcttgtgtgctctttcgtggggttgaggagtgaagggcaattccacaatgactctctagccctttgaagaaactccagcaatgaactagagccacattaatagcctcgtgtttcttccttgatgttgttcttaagtgcgcatagccaaagtaagagatcttgagtgtaagcattgcctttggatagctggtaaacctctctcttttctcagctccaaagtcagtcttttgttctgagtaatgaggaaatgctgaaggaaaggatccatgtctgaaggtctagagtgcttcaacttggggttaagtgtggaactctgaagaagtgggttggtaattgcatgagggaatttccaagcactctacatctctgaccactattgttaggtgaaaacatcaggggtaaagagaggaaatctgtgtgactaaaaattacacataaacatggttcttcacttctataaatttctaactttaaatgcataaggaaggccaggcagttttccactgtgtatgtgtatatgtgtgggtgggtggggggtttggttgggggagagatttgcatacatgtggatttccacatcccagattttcttaagtgcactttcagtataataaatggcaagagaaccctaagagtgtaccccagggcatggcagttcactatggttgatgcggtggatacctaatgtttactcctagaagaagaaataattggaataaggaaatgaaagccctggttaagaccaacacatttcccttttctttttttttttttttttttttttaacaacaaggctttggcttcatgtttatcacaagaacgggaatctgtttcctctgaaagaaaattcatttcacccacaaaacccatattttcccgcctgccttctattcagacaagccccacaagataaatgtgttctccaattcaccagcggtaaggaagataaaggcttggaaactccagaagtacattctcctaattattgtaactggcatttttttttatgtggcaaaccatctattcagattaaactacagcccaggagccttttatgtgaagattgccagtgtggggtggaaaggtagctcaattgtgtgatttcctcagctttaatagcccaaagagaagcattgaaagagatccaagtatttgtgtgcaagtgatttttgttaggaaagatctaaaaatacccacagcagcctgtctccatgttctctccctttgaagtcagcttgagacctttccctatttgaacacccagaaatatgtgtcagaagtcacctgttattacccttatgtcctggtttcccctaagatctaaataaacaaatgagtccagcaaatgtgtcggggagctccagctctgcttcacattaggaatatatttacccatttaataactgttatttatccagacatttaattgcaccattgtaaacacacagggaaacctttgggggaaggaagctcagttgctgagatgagacagatatttaaaactctgctcctgtagctgagccttctctcagagtcagtctttgggactgggattggtgtgagttgtttttatgtggtggggactcaccaagaagcctccacccactgggcatgctgcttttcagaaagtacccagtatatcgatgatgaaggaatgagtgaatgagtgcaggaaaaaagaaccagaggttaaagcaaaagtctccgcccattaccaagagctttgctggtgctgggtgctgggtggagcccaagcttttagtgtgcccatcattctatggccacaatgactctgcacctttgaacgatgcctttcatagcagcagataccctaaagagggagagctctgggcatcacagaagcattcttgaatctctgagtacattctcagctttgttcctcattcttcgatctgttcctcctttatcagtctcctggatttgggatcttctgtttttaggtgtatattaatcctttagacctgacaacagattaaataacattcacttagctctccatacttcctctcagaaataattttgcatttgtttttgatctctctttttttttttaattaactcaggtcataaatgcatctgattaggctctgtatcctgggatccaactatgagttgattcacttggtccaagccagcctggtatccttaaaactccctgctcatccctagctaaggttccagacgccccataaaaagcagttgccattatgttccagaacttctggaatgatctagaagcaacacccctcgaccttttctttctttctgatccctcttgctgtggtctgatgcttctgaattcttccaagggtcatcttatttttgaattcttcctcttcgtctaactctttcagattgatgttacagttggcctgtgtttctggactgtgattttgactttgcccaggaacctctgcagatggtaggtgagttctgccatgtctgttgattgacccaggttctcagaatcttactcttggaaaatatcccaggtgaaacccaaagaagggggagtttggtcaatggtttcatgtttcacccttttgagagtaataggacagcctaattttcttagcaaaggatctcacctgccactcctgacaccagccagtctccaagagcctcacttcttcctcatagggaaatctttctttgagatcccagaaaatgtgaggagtcttagaatccaatgagtgtcaaagttgctgactgatagatggactgactgactggtattcctcttccagtggtctcccagctcttatatggtgagtaaaagacttagcatcactgaatcatggaatattaaatatactctgccaccaaatatgttggagaatcctgtttctgacgtttccctttcagaaggtcacgatggacattagcatataaaaatcctcataaggtctgtagtgatgaaacctgccttactttcctcacccagggcttccatgcttatttgcccaccaaagccatttttcagaatgttacacacacaacatcccttggagctaatattacatggaacacgctttgcaaaaatattgatcttgcttaaagcccctgctccatcttgcacatccatatacacacacttgcacacatattatagttcaagagaacaggcattattctctatttaaacactcttcttcacagagccgcagtcctcccacaaatgcacagcccttctcactcactcattcccatgggggccacccgcaggggctcccatgtcccagcgaaacaccggaaagcacccacattcatactcaagaatttatcacacaaaccagggataagtgaattttttctgtaaataattaagcggcaatgatttcaggctctgccaccatgcagtctatgttgcaaatactcaactctgcctttgtggaacaaaaacagacacagacagtacccaaaccaataaatgtggctctgttccaagaaaagtttatgaatacttaaatttgaattttgtataattttcacattgccacaaaatatcattcttcttttgattggttttcaaccatttaagaatgtaaaggacattattaactaacaagccatgcaaagataagcagcaggctggcttggcctgtgggccatagtttgcttacttgtgctttttgccatcagtaggttcctgaaaacagcatgagcttctgtccgtagaatcctattgtaacatgttaaggagcctgcttctttaaaggatattgcaacgaattatttagcaatgcaaatctcttaattcctaaaccaggtgtcaagcacgggccttctgaatatttattgctctcctctgccatctttagagcacttttgcactgaaggcagggttttctggtttccctgggtcctgaatggggtctcacaccaaaagagcttcctcttttgccaacactagcccccaccaagctgtctggctgtcagggacttggcacctgacctggtctcagttggaagctttcagtccacagttctgtgcaagaagttgtgtgttttaacaacagtgatagcatctgcagaacaaccaagatgtcagtgtcatgtttgcatgctgtcaccaccatgataaacattgcatcccaaatccaagaactgatttgatttactgacaaggcagccctctccacctgaaagacaaagctggctgccttgcccacacatctgctttgtcattagctcggaggcagaagggaaccacagccagccaaggcagtcacagacagcatcttcccctacactccaggaaaatgcagaaatgctcaatcagccagtcatctcccctacaggacaccaggcaccccacttgagaggtacttcccactgatgtgactaaatcagtggtcgtttgggtaaggagcaaacactggtttggtgtgctcttcaaggaggttctgggtactgagcaggtgataggatttagaagtgtattctgtatggctataggtagtggcttctggtcactgaatctctcattaataattcactctgctatttgacaatatttgttgggtacctgtcttatggcaggccccatgctgggtgctgctaatgcagaggtgggtaaacaccacaattgccactctcttggagctcagcaagaaaggcaaagacataatcaatcaattacaacacaaaacacctggagaaagtgcaggcctaccagagggagtaattcagggttcagtctctctctctctctttctttccctctttactctctttcttctcttgtctctccccttttcctaaactaccaaaaattacttctaactaggttccccacttctaatcttgggcccctcctcatcctcttcacacatatccaatcactgaaacaaccctatacttttaaacctgcaaatccaatcatgtaactccctcactcaaactccttccatgggtggaattaatttgcatttgtctgatgacatatgatgtggagcatatttttatatgcttattttccatctgtacattttctctggtgagatatttgttaaagtctttggcccttttaaaaatatgttgttttattattgactttaagagttatttgtatattttggataacagtcctttatcagacacatcttttgcaaatatttttctcccagtatgtggcttctcattttattctgttgatggtgtctttcacagagcagaaatttttaattcaaatgaagttcagttatcaactttttctttcattgattgtgcctttggtgttacatataaaaagtcattgccaagtcctaggccatctatattttccttctaggagtttataattctgtgctttacttttaggcgcgtgatccattttgagttaaatggatctgagtttgtgaacagtgtgaggtctgtgtctacattctttttttgcatgcgaatgctgtcccagcaccattttttgaaaagatggtcttttctccattatattactgttgctcctttgtccaagatcagttaagtatatttacgtgagtcccttcctggactctctattctttccattgatccatttgtctattcttttgccaataccacatgtgtcttaatcactgtagcttcatagtaagccttgaagttgggtagtgtcagtcttccaacattgttcttctccctcaatattgtgttggctgttctgggtctgttgcatctccagatagactttagagtcagtttgccaatatccacagaataacttaatgggattttgattggaattgcactgaatctatggatcaagttgggagatgcccatctcttcatcaattcctactttctgtgtggtgatgatcacatcattaacctctctgagtctctgttttctcatctgtagaatgtagatgataatacttgataccctctactaaggcatctccctcaaagtgaggagcattaaagagatgacatacagatggaggtttacacaagcttgcttggtacatgacaaatagtcagtattagggccactttccctgacccctattctatcttctcctgttttccctgctttatgatgtccccatctggaaatccaggactgctcagattgtgaatcagtattttaaaaaataattttaatttttcagaattattcattcatgactttctgagtcattcttgcctggcacctcagtcatcctcttccactctgtccagtgaggtgaaaagttacgttctctgctactctgggatcagtgggttcatggcagccaaggtcttgaacttctcttttaattagacttgggactgagagcctctcagagtgacctctggatccacatcgcagcctcagtggcactgtcctctgtgcactggctttgtctgactcattgatctgcctctaggcccagtgttgactattgaaggtcactggggccttcatctcaactggcgttccagccctacttcatgtctgaaccccagtggagtgtgtgtgtttagagctgggttaactgagagacgaaagaggtagtggttgcttcaggacctgcctggactgggaaatctcccacagtgtggattcataggcatttcatgcacacacctctgagtgccaatacctgaaacttgccctgagattggatgattgattgtgcctttcttagaatcagcttttgataaagggaaagaagggtaagaagacatggatatgaaaatggaatgagcacaaggtttctcttcttccttttcttgtgtgtaaactgatacacgtatccttagtgcacatggaactcgtgagttgatgagagtgcatggtgtacccaaatactgaggactgacatccctcagaggtctatgttgggaacccagcccgaaaacttataaatggtgtgtttatcttgaggaagaaatggcagctgccacaacacagccaggaatgtggtcttagaattttatttagtgcatgaatgctaacaagttgctatatgtgctgtctctctccatcctgcaaagttgaaggcatcactaatagatcacagcacatattcctgctgaacctgaactaggtcttggaattcttttcaataaagcaaggactattctcatatccacctggaaactgagctatctccacctgcttgaattcccaccattttgaattcccacctgctgatctcatactttcagggccctgagtaagaagaaactttagatttaacttccttgaacctagacattaatctgctgctttttaattcttacaggtaaactaaatatatgcatttgaaaaaaaatcacttgtacaatccaggttgtgaaatattgtttaaactcattcataggttagtaggaggcagtttatggggcaaagagttgagaaagctcttggccatgggtcaaacagtattagggtatttctggcagggaaatgtcttaacgttttagggaattaggaagaggctgttgtgggaagggcaagagcaattgtatcagtctattctattggtttccaaactttgctgcacattagaatcatttggggatcttttaaaactctgatgctcaggtcatacccaacactaattatgtcagaatgtgtgggggtgggcatcaggaggcatcagtaattcttgttcttaaagaacccaggtaatgattcccatacagagccaagtgcaggaacactggtctggatgcaatgctgctttatatctgcccatctcccttctctccaaaggtgtcttcagaattcatttgattctcacaatagctccatgaggccatctgagcaggtgtcactgccccatgggacaaataggggaactcagccacagagaagtgaaatggtttgtctaagttcaaattatgtgagttagtggtgagtcctgggatcttttcatgtcaggagatgccgctacattgttatttatagaaaaaaggaaagatgaatgtttttatgtaaaaaagattatcagggtatgcactaaaggattagcatgtggcacccttaataggtcccattctggaaggatattttccaaaacgaactatgcacacacacatacacacacacacacacacacacgtgcattcacacacacactccagtataacaactaatgatagaaaaaagggaaacaaaaatcagtgactctcctatcctggcctcagaacagccggggaagcagaaatccctttgcagggtggcttccatggcagaaggtatgtaaacggcatgggcctttatgaaaggggagagattcacaggacactatttttcaggctgaatcacaaggttcagtagctcacataatgagattatttcaacctgcaggtcaattggaaaagcaattacagatcattaaagcacattgcccagctcttcagccctgcctgctccagccctccttctctgtgtctatcacttctggccctgctcttcatttcacatttggagccagagaggagaaacaggggacttgatccaggcagactgcaaaggctcccacgggagaagatcagacaaaaattcccttcttgctcagtgatcgtttgaacaaacaactcgtcttagagaggaaaggattcacgctcatatccctccatgtgctggacaccatgtgaaacattttgggtttttttgcaggcattgtttcatttaatctcccttagctaatattaagcccctattagtcaccagcccatgaatgccgaggacttgctactcgtgatgtttcttcccagtctgcacatttgcagtcatccctaagagatcacagcacacattcctgctgagcctgaattaggtcttggaattctcaaccaaccagggagggtctgctcttacattggctttagaacctgagacatagtctactgaactcactctcaggggtttttccattttgttaatgaagtagctgaggctggcagaggggcagcaacttgcctaaggtttccctgctgggaagtggtacagctggaactcaaacccagaccacaactccaaagttaatcacagtactggcattcctatcggtcatgtttgctctgacctccatgctcctgcacatgcagaacttctcccagcttggctaattcatattcattcttcaagacctagtttaagggtcacttgctatatttgtgaagctgctattactacctctccctggccctctgaatattagatgtccctttttctctccctgttcctgcaccaccgtgggcacactttcattatcagataaaaacccctttattgtaaagtttagtttcttatccatgctaattgtggatattgtgaaatattaacagatgggttttctccaagtatctagtgcttcttctgcctctcccctacccacagagggatcagcagggtgacggcatcctttgccaattgctcttgaggaagggctgctatgtcagcaatgccatttaattgagtcaatggtcagcttttaaatttcatcacactgttcaaatcaacaagacaacggctttgaaggaaaaggctcttagcatgtcaagagcacaagtctaggtctaaacagattaagaagctttatcattgtcatttttcccctgcctgtccatgagttgggggaggagagattggagaggagagcaagacaataagatgctggtgagcactcaggggaggccagagggaaattgtgcttgcttccagggtggggaggattactcaagaatgagagtaagatgctctggctcgcccatattgctccagcccagggcaggagtagaatgtaggaatgatggatcctgggcagagaggacctgacccagctcctttaagacttctggggctctagagaggctgaggcgagcatcagaaattttatgtgaacccaagagggatgtggaaatgactgagaaagagctcatatgagattataatgtagatggtgaaattgaatcagatctacccacattagacctaggacagattccatttccttaggacaaacaggatcctacctggaccctcccaaagccactgtgctcctccttcagactgaacctctcactgggtgtgggtcttcttggcaggactggtgggacttcccagcacttgtcttaccccagggctctggcctccagaactcagaaggtgggagggggcttcttatgttccctgtccattttttggctcagggtgagctgctgatatcctcatctggtgccagggccagttccatccttaatgggcaatctcaggggacctggcagcttgatgtgggacagagagcatcatccatgaggttctaccatggaaagcctttataggatagtgaccgcagaatggtcctttaaaggcctgtagaaattagattggtaaacaagttggggaggagcacggaggacccagaggtagagagcaaagagcccagactagggatattagtgacatccaccaggctggaaggaacaagtctgcctaagccactcagccgcaaactcagtcttagaaaaggacagggtgacatcagatggtcctcaaccgcactcaaggttgaaaaaacaaaaaacaaaaaacaaacaaacaaacaaacaaacccagccccagagtgccagcattaaagccaagtttttttgtttttgatttttgttttttttgtgacggagtctcactctgtcgcccaggctggagtgcagtggcacaatcttggctcactgcaagctccacctcctgggttcacgccattctcctgcctc[134 bp omitted]ggcctcccaaagtcctgggattacaggcgtgagccactgcgcccggcctaaagccaagttttaaacaatgagggtatcctccttgctggtgataaggtaataggggtgaaagataatttggcatgctttacatttttttgttttcaagaatagttgctgcctgggaacaggcacttcatacccacacgtttccgcaaatctgttggtttcctgaggttgaatggttggtagagcacagtggagggagaatgaggaaggtctctgtggggacattctcttggtctccttccctttgggccctcaattctatccacacctatgattcaggtgggtaggttcacagagcatactgcagggggactgtggctggcaagagtggggacttgcatggagaaatgagtttctccatgcccaggggtaggagagtagtgggatggtagcttcacctcagtctttgtgccactctttcctcccaggagattccgccttttaaagccccaaggacattcagctggaagtgtaagcctaaattcctgcagccctatcacatatcaagcttcctccatgggaagcaaagaaaaagcaaagcataagtcacaggctacttcccggcatgactgaagtgacatcggatgcaaaaaaagtatccgtgtgtgaccatgtgtgcgtgtgtatgtgtctgtgatgtgggaagagaggcagaggtctgacacttccgatttggggtttgagtcctcagggctcttaagcaaatgtgagacagcaatgcaccattacaagcagcctctaatttattgattgactcttcataaatgccagctaacaatgttgccataaaataatgtgcccgtaaaagacctggaagatttctcttatggaaataagggcagcactgtgcttctacattgggtgtacaagtggcagaggggtgtcactttagcaaatcctagaacttactaagccaagatggatgggaacctatgggctttattagcctgtctgttgggatttgcgtgtgagtggcacatatgtgcaggtgtgcgaccgcataattattcataatttttctgtctgtttgcctgtataaggatctatgcaggtccataaacagacatgtgtgcacacacattatgcaacgggagtctgtgctagtagtgtcttttgtgtactgagttcctggatagtggggtctgtagtctctttatctgtggctcccaatgtctagtatatagatgttttataaatgtcagttgaaatgggaaaaaagtgcatatgtgtctgtgagtctctgaggtgagccttgttggtatttgttggactgtgtgtgggtatggggaccaagcatgggcattgaggtatgacagtgtaggtgtggtgtgggcgagtgtgttctcaggaaggcttttgcaaggctgtgagtgtgggttaaatatgtgtgcccttcctgagacactagccatctcaggcctcagttcccatctttaaatttctcagtttcccatagtggggtctacagaggccctgccacctcacataggctccgtatctgcccagctcctgaatcttcctaggaaactggccaaggaaagggcacttgtggagtctacccactgggtagttcacacgctctggttggtttaacttggggcatggcccccacaggctgttgctgaatatcatgttgtcccctgagttccaatcctccagcactgctcatgaaaaccctgggctgtgcctcattagcccaaacccattgtgtccacactcacccatatttcttagccctctttttgttttggttcctgaaaaggtcttgacttaactcacccctctttggaggatctgaattcctcttaccaaactgacaccccttggataatcttgactattggtggctagggatattgcccagggctggtggtactgttctgctcacctgaggatatcaatgtcatgttaacttgcattctgttagctaatgactggataccagcttattaccactccctaaatgaattgatttgtctttgtttactcgctttactgtccttgccatttccatagagagaatattagaaatactagagctggaagtgttcctagaatgcatctactccaatcctctcattttacagatggggaaactgaggcccagaaagggaagtgataccggttatttttgaattatttatttcacaggaagtgtattgggtacttatgatatgccaaatccagggctagtatcacagtctacgggggaggatagacatgtgggctattatagtaaaatccaagctgatggatgttattacatagggaagtgcacattacatagggacactttgttatataaggaagggggttattacatagggctgtgggaacagagaggagaggctcttacacagatggaagagatgaggggagacttccagagcaggtgacacatgagttgtttcctgagtaggagctcaccaactgaagggggggcgggtggggtagagaaagtttcagcaggtggagaagcttctaatttaatgcattgctatgggcttctttccagggcacctgcttctcattcttaatgttccaaaatgcggaggtgaagatgaatggagggaaaaaggggatggataataaaagtctaaaagcatgaatgaatgcatgaatgagtgaatgaataaaacccacactgttaatgtccatcatgagctgatatatcatatatgttagctcatgtaattctggcaacattgcaattattctcatttgacagatgaggcaaatgaagcttagagagactgaataactctcaggtcatgcagatagagggaagcagaattcaaatccaggcctgctgggcactgcaactaacttttctaccctaccctgatgccaactgttgccaacctacttcagacatcacatgaaaaaagtctgagggtggtatttcacttgactcttccctcttagtattgtaagggagggtagtccttgtcccctactcaccagccacagagaggggaagaatccctccagccctccctcctgcagaagaggcgaacctttcccatctgcctaaattcacatcagtgaatcaaatggagtctctgccagtaagcatattaatggggcctttcccagtccccaaatctgctgaatcttcatcttcacttgaagccaaatgaagtttgatttttaattcaccttgcagagtcataaagcaaaccagtgattgcagttaatgctcaaactctgtctctttccagggtctgccgcctgcctgccctcacggctgactctgctgagctcacaccgcctggcaggcacatctcactgctctcccagagcagcagtgccccagcggggctgcacactggaaccacctggggagttttaggagcaccgaagcctggcccccatgccagagggtctgatgtcattggactctgggcatccggattcttcgacgttctctaggtggtgtgggcagctggggttgagaattcctagcccaggatgcatccttacctgaggcacttgggatttaaacaacctcatgctctgagacgtgcttttgatgctaggtttccctgaactgtgcttctcttttgaagatgaatcttttgttttgttctcttttgggggatccccctactgcctcagactctctgagcctgagttctgccttgcctttgtcatgctactccctctgcctacagatggcctgagttctgtgtctctaacctgctcacagacctaactggtgctgccttctgcttagtcttggattgcttcctataaagacactgtcacactgtcttgggagcaagtctcatgaaagaaaaacagtgccatttcagaggcagagaatctttggtgcaaattctagcctggacattcactggtttgtataacctccctgagagcagttttgtcctctgtcaaatggttgctacggctgtttattactgtacaataaacccacccaaaacttagtggcttaatacaaccatatttattttattaaatatttatatgatcttattaaaatatttattttcctaaagaacccacgatttgggcagggctcagcagggacagctcatttttgctctagtcagcatcaacgggggcagcttgaagcctggggctagagttctccaatgccttgttcatccacatatctggcagccaaggccagagcgctgctactgcttgggcatctttccctctttctgcctcaacatggtctatacagcacatggtttcggggtaccacatttcttgtacgttggctcaaagctcccaaggtatgtgtctaagacagagcctgatagaagctgcatcttttattgaccagccttggaggtcatgaagcatcctttccacttcattctcttcatcagcgcagccataaagatcctcctggagttgagggataaggaaatagactccacctcttgatgagggtgtaacaaggtttatgaagagcatgtgggaagggaaaaacattgttgcagccactttgggaaactacaatctgctacaatgggaataagaatactctattgtaaaacagatttattttggtgattaaagaaatgcatcctaaactcttaacctaaaccaattagcttttattatgaataaaccttttgcatatattacctcactgaaacctcatagcaactctgcgaagtaggtactacttcctccttttacagaagcaagatccatggttcagaagccagctcaggtcatacaatagtgagttacaggtctggatttgaagctctatgtggctctgaagcggtggttctcaacctcagatgggggaaggtaattttgtcccccaggagacatttagcaatttccagagacactttttggctgtcacaactactgtgggtggggcaagtgacacaggcatctaatgggtagggatgctgctgagcgtctcctcaaggcacaggactgcccccacaacaaagaattatccagcctaaaatgtcaatagtgctgagattgagaaaccctagatgatgttttaaaccactacttttttgtaggcatttcttaatgttgattcctgcttttccttcccccaatttcacttgccattccagcttctttcctagagcagcccttggctggtgtttgttctactgggtttggaatgaatcacaacaattaaaattgggcatgccttccaaggccccatcttgctcaagggagttgaatccaggtctaggagatgagcagtctcaggctgcttgcttggggtctactgggctaagcttagctttgctcagagaaaaagcatcatgcttgtggggtggggagtcttttgggttatgacccatgtgctatttaggaaaaacccagggataatgccgtttgaagctggtggcctagctatatgcctttcctaagaaaggctcttcacagagctggtaagtatgcctctcagctccaggaaggatggaggctggaacagtgcaatgggattctttcacatctgcactgatgtccgtacaatttagtcagaggtcagatgttttaaaagcactagaaattaacctttagcttaaaagtaagtttctgtcaccctccgctcctctctctattgctcatgggcaagctgcctaatgaacatagctcagttccaattgaagctgtacagatacttggtgcagcatgaagttagcctctgaaggcttttaggaagagctaggaaactgtgacaaaggaagggagatacatttatgccaagacaataattgcattaatgctctgtactgaggacttcatgaatctggatgtggtcaaggcctgggatgtgaagggcatactctagaattaagtcttcttttaacgtggccataacaatgacaggtggagctaagtgcaacatcagggatcattgcagtttgggaaattctaatgctgagactgtgaccttggccatgccagaggatctccggcagagttgcaacagtgcatcagtgctcgtgccaagcaaacttggctttgaatctgggacctgccacttacctgctgtgtgatcttgtgctagttacttggcttctctgagtcacaaaaaacattaaacacaatgacacagaacagaaactcaatgtatggacattgctatcattattcttaattcggttctgcagaagctgaaaatctaatctggaaagagaaattgctggagtccctaggatttgaatttggaaagctgtatgtcacctcaggcttcggtctcctgcctctgaattccctttgctgcctacctcaaggagctgaaaatctgagactcttatggagtttgcagtcagaaacgagacaatgatagaggccccagctgcccaatatggcaactactgtccacatgtagctgttgggagctcaaaatgtggctgatgtaactgaatatctggatttcaaatttcatctctttttaattatatttaaatttaaaaagtcttactaggttcagttattggaagacctttaagtatgtctggaacaagttgatatgtgaacctcccttttcaactatgatgtttatgaaatcaaaatacagaccagttattttcattgaaaactgagatgagctgtaagtataatacgcatggcagatttggcagacttactacaaaaaaagaaggtaaactatcttgttaataatttcttttatgtggattacattggttacatgttgaactgatgacatgttgaaatattttggatatattgggttaaataaaatacattattagccagcaatttcatatgtgaaaagaaatatcatgatgggcatgttggcttttttcccctttgatgccaatatacgtgtatacaagtcagtcaataaggtttgttctaagggtaaaagtgtagattctaagtttacaaagctaaagagtattaaaaaacatttgcattctgaaattaaataaaactttaataatggaaaaaataatttcactttttaaaaaattattttttacttgattaagattttttaaagatacaggatgttgacatgttactcaggttgctcttgaactcctgggttcaagcattcctcttacctcagccttccaagtagctgggactactggtgcgtgtcatcatgcccggctcacttatttccttttacttcacttaaatgcggctgttagaaaacctaaaattacgtataaggcttgcgttatagttctatcagctactgctgatgtagaccacccagccagctttagatctagaccctagactgcctctcatctaggtacaaacagttctgccgggagttctgcattgggctttagagctaatgcttgagatgaataaagcacgcactttttctgatttgtttccttgcctctgtgtatgtattttccgtgaggaccttgtgggaagatgtggatggtgggtattgatggggtttggatagccctgaatctctttcttagtcaaatcccatcttaacattggccctttaaagcaagttgctttccctttactgaatgtgtttctattcttccgttgtcccacccctcaaatacctagcttggttagtttactgactgcagagacgaggagttctccatcttactggttcaaaacatatttccttcgagctctagggaaagccttctcgtccaaacacttccagatgtggagagctaatctttgttgagtctatgcacacctcttggccctttaatacacttgaggcttggcgcattttgatctcagactttctgggctgcagtgtccagaaaggccctgaaagccctgttgaggccctagcacatgccgactcctagtaaaacctgtgcagtgaatgaggaggaaaggcaacaggtgctgccacaagtcaaacaaggaacagatgagccagccttgtttcccaagtctaatttgcacatggcttcgtgatatttaaccaaatgtgggaagagaataatatttctcctatttatccccaagtcagtcctgaaacagattcatcagcaaactcatttccttctcaggattttcggtaactgtttcacttgtttattgaaagggaatgacagccctgattaagttcacacatattctttatctaaagagaaagatccttagaggtcactaatccaatcgctgtgtttctccgtgggggaacccaatacctggaggtataacagtgagcccctttcagcttggaggttgtgaaatactgtggtaacagtcttctgttctagctgggaaggtgggaaattgtggggatgcagcatgtgatttagaaagagatacgaactggttggaatcttggtttgaccacttactacctatgtgtttctgaccaagacccccttcactctctaaacgtcagcttcatcatctgtaactggaatgacataacctacttcctgggtttgtttgcaagaacacagaacctgacataaagtaagtgctcaatcactggcagctcaatcctctgagctaccgtaatacccaacatgtctgttagtggttggcttatgggctaggctgcctctcatgtaggtacaaacagttctcccgggagtcctgcattgggctttagaggtaacactttagatgaataaagcatgcactttttctggcttgtttccttgcctctgtgtatgtattttccgtgaggaccttgtgggaaggtgtggctggtgggtattgatggggtttggatatgtgagctcctgagaaattagaaacctatgaattccccatatttctcatcatcttttactttattttaatagatcattgaagcaaatccttcagatttttcactcttttctaatattcttagtcagtgatggcagtggaaccccagcttcaatgttattcctcaggtttttgggaagagaggagatgagataaacttcaagtcctgaattgatcaataactatgtttattcttgctctgattcttgtccatatcaacttttgacaggaagaagcagacacaacagaggtaatgtttgggtgggacactattaagccaaccaagtaaatggcctgggatgtggttgtgagttcttcataggtttactcaaaattagggaaattctatacctaataccttggatcatggcaggaaagatgtcgttatctacaattttagggctcgctctgttgaaagcagcatggttgaaaatggaaagcttgatcataaatttagttttagatttttaagcatgaagtaatggccacttgctgagaaagtttgaggttgtttttatttttaatgatcacctcagttgagaagtgcctgcatgcagaagatatgcagtgtagacaggagacccgagttcaattctggactctactagtgactttctctgtgaccttggagaaatagtggctgtgtatcctatagacatttatcctttattctgcaccctgttcagtagtgggggctttatgcagtcttgcttcttatcacagctgtaaagctaactaactagctcgatgacacaaggctggtaaatagtgacaggcaggatgagatttgaacccaagccttctggttcctgaagcccatttccatcccactgtgtcatatttcatttgcagaagacaaagtctggaaggacttagaaaaataatcatggaaatttgtggggttggggaaggtttaaacgcataaagtcaagataagtttggaagtagatgtgtatctcgagtcgagagtcagaaaactgcctcagaagcccatgccccagagagctgtgtccatggctgtttctcactcttcatgttcccataggccattagtgggtttcagcttccagccgtgtctgtgagtagcagcaagggcagcaggctgatgagccttacactgatagtgtctcttctctgattagtatcggccacacttctttcattatgtatgtcctttctgttccttcattcgccaaacctttggtctctatgttgcaggcactggactacagacctggaccaccagtaatcccagacctcttctgggttagatagaaggcagatctgggtactccatacactgttctttccaggcttcagcattggaagtttttccagctgctggcttttatcactacctctaactctatcccatgcccatgttttggtgttttgggttctttctgttggtttatttggtgtctgatctgttgaggctgctctgatagttatattctatggatgtgccattcttctccacgtctggcttctctctttgcccccataaccagctgcagggggctaaaactgaggagagtggattgtttcaaattcaggcagtttgtcaaaagtgaagacatggcccagaagggtgacttaaaaaacagagaaaacatggagattataaggaaatgacccacaggaaccattcttataagggagaggagcaatggggatgggcttttccaaactggaggtctcagaactccaaacagactacctgagataaagggtattatttttactccgaatgcccaggcgggcctatatactaagattggaagcacttattaagataggtaactccgtgtccttcagtttggggccaaggactatgaaggacatctgaaagatacattgtgaagaaggaaattaaaagaaatctcctgatgaccatctcagacagatattagcaggtgtctgtgtatatatgtatgtatataattttatacttttaacatttatacttttataattttaaaattatatacatatatataattttttaaagaaaaaaggctgtatagcagttataagtatgagctgatgagctattgaatcagattctattgaaatatcactcctgcaacttatttgctggttaaccttgggcaaatcacataatctctttgtgtctgtagttccccattggtagatgacatggtttggctgtggccccacccaaatctcatcttgaactgtagctcccacgtccccatgtgttgtggggtctttcctgtgctattcttgtgatagtgaattaagtctcacaagatctgatggttttataaaggggagttcccctgcacaagctgtcttgcaagccccatgcaagatgtccctctgctcttccttcgtcttttgccatgattgtgaggtctccccagccatgtggagctgtgagtccattacacctctttcctttataaattagccagtctcgggtatgtctttattagcagtgtgagaacagactaatacagtagatgacaatattaatgacacccacctcacagggttgtggatagcattgaacaaggtgatatacatgtgcacgtctctctccccgtctcgctctctacttctatctctgtatgtacacaatacccagcccatagtaagtcctgaacaaatgcttgctattgccattatgtgattctggaacttcactaaatttaccatgtcttctattttttgtcacttcccaactgcataccttgcctccttccctctaaagtgtagcagtaaataccatatcataagaagggtcctagccttgtctctagaggcagcaaggtggaacaatcaatgtgtcccactgaggcaggaggatggggtcaaagaagaccaaagcaatagggtgaatttggcggtggggtgctacctaaaaaggcagtgatcctctgggagcactggatggaagaggggagacatctgggatcccctctgagccagagacagagtcctgtgacacaatcatcattccattcctaacaggatccctaactgaggcccctttacaccctgagcaggaaggtcctaatgtttcctctaaagcttcatgcgcattccacagcatttctagcctgcacctaattctagctaattagagcaggggaaagaactacctcctctgaggatctccatcttgctatgtctggcagttcaccaccattaccctcactcaacatcagttttataatctcataatgggtttttctaaaattcacaagcacttaaagacctcaaaactataaaaacctaaggttcctttggacaccatcgaatctaagaacagaatcacaaagaaaaattcttggctactgtttaatccctaaaagaagctgtatccaaatttatcaacaaaatgtttataatcttgaagatgtagtatagttcttaaataaaagatatataagataaattttagttattttttctactttagtaatagatatatctaattaaatacttgaaagttcatttaatttttaattcaggaagtcattcatgattgaggcaatttaaacaactcgggaaaaacctcaaaccctgatgaaattccattagctatgtggatactttaatggtacactgaactaatgttgaattatgatgattctctgttgagatacctatgcagtctaccaattcccttttgggaattcatgcttttagcttttaatgattgaatcagttgattagatggatacaatacagtttcaaggttaccttttatagttcactcctcagaggaagaacatttgctccagccttcccttgaaattcagtggtcccatagagcttacgtaagcatagttcctcttagaactgccctgtgcatttgtgttttgccaccttcatggcatatgatggagggcgcagagacatccctttttgggggagtgaggcacgattgggagctgcttccagtctgtttctaaaatcagggctatagcaactccaaccatctgtccaccaaccatatgcgaggtcccgtgatctcagactgaattttttcatgaaggtcacctttccctttaacagatagattcacagggctggaggaacgttggcgatcacgtagcccattgcctttatttcaccaatgaggaaacaggcccagagagggcagatggttttcccagtgtttcagagctagggaaggactggaatacaggtgctccatcacatgctttttctaccatgccttattacctctgtgctcctaaggaccaaaggtagtgcagactggaccagaccttatgatttgattttcatgttctaggggtggagtaggagagatatagggtggaaaaggagggaagtcgttaaaaggaaaggtagagtcagacatagtgtctgtctaccctcgaggatcttttttataaccttaatagagaagcagtacagatatactccaagcaattaggagaacattataagataatatataattaggtactaaattacatggcatagagaatggagaaacctttatgtattttaagagcctagaagtctttatgaaggggttgggcacataaagttgctttgaatcttgaaagcatatagtttgttgaacagatgagggtttcttctgtatgttagaaatagtctgagattttgatgtggctctggagtcatacagccttgagaagcttacagaaatacttcaagccttagcttccttatctattaaatgggaataaaatacaatcattgagagaaggtttgtctaaacagaaatattcagttgcagtcagaggagttaaactgagcttctcacacaaggaacattggacagggagacaaagacaacatgtttccctagtattttctttactttagacccataggactaggtcctgttgcagctcactcttttttttttttgagacagagtcttgctctgtcaccaa[131 bp omitted]tttttttttttgtatttttagtaaagatggggtt[132 bp omitted]ccaccaaacaacaacttactacagtatttttttttccttttcttttttcttttactttaagttctgggatacatgtgcagaacatgcaggtttgttacacagatatacatgtaccatgatggtttgctgcacctatcaacccgtcatctgggttttaagccttgtgtacattaggtatttgtcctgatgctctccctcctctttccctccactcccgacaggccccagtgtgtgatgttcccctccctgtgtccatgtgttctcattgtccaactcccacttacgagtgagatcatgcagtatttggttttctgttcctgtgttagtttgctgaggatgatggtttccagcttcatccatgtccctataaaggacatgaactcattcttttttatggctgcatggtattccatggtgtatatgtgccacattttctttatccggtctatcattgatgggcatttgggttggttccaagttttgctattgacaatagttctgcaataaacatacatgtgcatgtgtctttatacccaaaggattataaatcattctacaggctttttaaatctgagggtatttagtcttcacctatcccttcatttacatatagtgctctgtaatcttgatatgcctttgattcactgagggtcctctaggggttgggatgagagggccatgtgacatcattggtgcacaatatggaaagagctcaaatctatctggaaaccttttagtccttgtgagaaggtatcatctttgtgagaagtgatcttccatcttgtcacctcatcagtaacttgtatgacctaaatacacaagaaagaggtaagattatggcatgaaacctccaagaagaatatatgaagagctggtgaaattgcttggtggactcggcgcttcctcgtctcctgatggctcttggaatgggatgtgaatgcggagatgaacttggagtgaaatgtgaagatgatgtgagagcacgtaaactggaaaaaagagggtgaaacgttacagtgttattcgtatatgcattgataaaatatattctatttagttccactttggtgtttcattgcccacgcccataatgtaggtgaacacaatgtagataaaaacaattctgaaaattctgacaaccagaccagtcttactcatcttctcattaactcatggcttccaaaagccattggctgctaaaagaaaggaaggcttctagcagaagaaacacctagttcttagggtcgtgtgatggataagtgaaataggagtataaagtgtctgtcatagagcctggaatacagtaaatatataataaatggatatttatttcctagactgcagttccctgagatgtgtgtggtttacttaaagccaaaatgaactacaacaaccactagtttccgttgataggttgaccctgtctctgacttccagcctatgcactggagagaaaggtcttccctgagaaagagaccccacctggtcaacaaaagggtggggtttgagggtaaggagagagttgatgagatccacccttagtcgtggaacagaaaagcagaccattcactgacagccactaagaaatggagttagagacatagaaacagagtgcattgtaggattctgggagctttgtctcttttccttgttagctttggttcttgatgtctgtgtttgtatcattaactaaaaagtgctgcaataagaaggtctcttttgcttgttttcagaaatactatggatggggatacagctgatattgttgtggatagtcacctgggggagagcagaaagtgacagctgtgcagatgacagaaagcagttagactccctggggtttttgggaagataggagcagagtgttgtacaattgctccaaggcaggacattatgttaaacttttctttttttttttttttgagatggagtctcactctgtcatccaggctggagtgcagtggtgcgatctcagctcactgcaaactctgcctcccagcttcaagcgattctcctgactcagcctcctgagggattacaggccactgtgcctggctaatttttgtagttttagtagtgatgaggtttcactatgttggt[132 bp omitted]tgtctatataaacataatcattttaaaattaagatatataataatatagcatctactgttcaacccaaagcagaaatattttctccagaatcactgaaaaggagggtgattatgcttgcatgtgttcaacaaagaggatttcaccctattcataggcaacttttcctataactgagttttaaaaataaattatattccacttattagaaagctcttccttataattaagctgaaatctggcttcctcagatttttttttcttggcttgtaactaaggtctactacagcacaatggtttgtccagacttatagatcttccatcttgtcacctcatcagtaacttgtaacttctaattgcttctcttcagtcttattctgagagaagagaaggtagggtggtcctctttttctaggcatcaacttcctgtcctacctttctccctcctttttgtcaaaataaaagtgggcccttcacctgttcttggcatgagcatgatgttagcgggatggggagatcagtcccagttgggcctgaaaacaacttgtggtcatgtggacctcccatctctaacagctaagcatctagtactattatattttcttatggcgtctccctctaggtgtttttaaacatatttacattaaaaaaattttttttttactttaagttctggaatatatatgcagaaagtgcaagtttgttacataggtatacatgggccacggtggtttcctgcacctatcaacctgtcatctagattttaagccacacacgcattaggtattcatcctaatgctctccctccccttgccccctaccctccgacaggtcccggtgtgtgatggtcccctccctgtgtctatgtgttctcactgttcaaattccacttatgggagttatatttacatttcaaaagcaagtcctgcagggcgcggtggctcaggcctataatcccagcattttaggaggccaaagtgggtggatcatctgaggtcaggagtttgagaccagcctggccaacatggtaaaaccccatctctactaaaaatacaaaattagcaaggcatgatggcatgcacctgtaatcccagctactcgggaggctgaggcaggagaatcacttagaccgggaggtggaggttgcaatgagcagagattgcaccactgcactccagcctgggtgacagagtaaggctctgtcaaaaaaaaaaaaaaaaaaaaaaaaaaaaaaaaaaaagcaagtccttacaaatttggctgcccttttaagaaaatgctgaaaatctataatttatatttgcatataaattatgttgtacctcttctcctccctagtcgagatttttgggggcctgctcatacatatcccattaagtcatggaggattttatttccccagacatgagattgaaataggttgtgaaaacactgcctaatgatccctcccggatctcttgtggattaagtgtccctcaagtgctgggaaagttccacagtatcactgagttcctgccttggttcaggccagatcctacattctgggctaccccgaagaccaagaccacactgtcttcccttaaaggattttcaatcatttcttttcctttggatgagactatcattaggcagattgataaagttattattactttcttaaaatctttctctgatctgaagtaaaaaaaaaaaaaaaatagagtcctgcaaagttttggtcaaagaaatgtctactcctgatttgatttgggaactgtcagtgtttgtgcatatggggcactgagctctgcacgcatccacatcagcctcctccctactgacagcaggcccgtctctcccagggacacagatatcattattccttgcaagtgcatggcacactgtcaggagtttgttctagaagagcaaaaaggcccagaaacaatcttgaagaggagagaggagggaagggatggagaacaagactccctgttctgttgacttggaaactcttcgctttggagcagcagcagatcagcccccatgtctcttcctagcctctgttttgttgttgtcctttttcatttttaccctctcttctcttgtctccaaagtattgttgtgagatatgaggaaaagagaggacaaaaaccatcgtagttcatcactatcaacagaaagggaataactggagttatttcttatcatcacctcaactgctctaccaatactcatctctagccttaaaagaggagggaggacctacatcattggttaaggattttgccttttattctccctcaatgtagaaataacgtagttaagtgttggcctagatagactagcaaagtggtatcaaaatatagctggttttgtgtgagaggaaagatgaattctccacaattcctgacttctcacatcaccaaggaaaatccagaaatcactggagacctaggaaggccaggcattcatagtaacagggcactaaatcattaacagcagacaggggatctcagtatatcaatgttaaacacaagcttgagcctctggctgaccagaaggcctaatgacaggcaggcagccttctagacaaaggcagttcaggacgttggagagatacactggcagtgagatagagactacaaatcaaaggttgaaggctatcaagttgccctttatttacacccagccctggaatctgaagccaaccagtagactgctgcaaagctccaaatctttagcaatagccagactttaccgctgtcacctgttaaaagtgtcatgttggcatttaaagattagaaaatatctaaagttaaagttaagtatgtttttgccacaggatccagcaactccatttctagaatatatttactccagatcaatgtatataaatatattccaaggagtagattctgaaatacatgccagataatgcaggtttctatgcaggcccttcggaaggcaggcacaatgtttcctttgtgctgtttgatttttatagtggagacttagaaccaacacgggcacctactgttagaatatggacaagtaaaatatggcaagtacatattacggaatattatgtagtagttagataaaattaacaagatatatgtgtaacaacatagatagatttttaaaacactgttgagtgaaacaaagtttgaaacaatgagagttatagttgaatcttaagtagacacacatgcataaagatcaaatatgttaaaacgggaggctgcattggaaatacgaaataagaagaaaagtaaagaaaatttaattttctttgatggaggtggtttttatggaggggcaataggcaaattacctccataagatgataagcatcccaagggccaatgttatgtctgtttcgtttaccattgtatctctagcatcaagtgcagtattggttttatagaaatattctaaaataattgttgaattaattaccttactaatttaaaaaaaccccagagaaccaaagaagaagaggaaaagggggttactggagtactgaaatatccaaataggctatctgcattcctttgtaatcggggagcagatagtatacgctgttttaatgagaccttccgttctctttgtctgtgtgtgtgtgtatgtgcgtgtgtgtgtgtgtgtacctatgtgtttgtgtttgtgtgtgtgcatgtgtagaagacctgggtgttggagcagaaggaattgtgtatcccccatcaaatgtcacggtaatggtctcagatagaagcagcatgatgaaaagtggaagagacctagaccagaagttagtcttggcctcttctttctgagatttgtgtttgatatgtatgaaggcattagtactgcatcacagacttattgctggtttaaaataatctattgcagctgggcacactgtctatgcctgtaatctgagcactttaggtggccaaagtgggaggatcgcttgagccaaggagctcgagaccagcctgggccacatagtgaaaccctgtcttgacaacaaatgataataaaaaacaattagctgggcttggtggcacacacctgtaattccagctactcaggaggctgaggtgagaggatcacttgaggccagaaactggaggctgcagtgaatcgtgatcatgccactgcacttcatcctggatgggagtaagaccctatctcaataaacaactaaataaaagtaaaataaactattgcatatgggcatgtttagacagtttaactggtttgccacatctatataagtcattatcatcttgccaaagtagtacagcctgctgtcagtatcaacttctgtactgctcagatgtcaatcattatcttttgctttcaaagccactcatctaggtagggggaacttcatagcagagccagggcagggagttttagtagctatccatgaagagtgcactgtacccatgagagcactgtatttcccactctaaacacattccaggcaaggtccttttttagatgagtcttcttccattggagatctctagaagctcatcaaataacgtccaggcccagctgttggtatttgatggtttctgtaatagatagtttttgtctcatgtgaatcacgacagataccagttaaccacagtctcctcatcagtggcagagttgtaaagggccattcactgggggaaggaaagtttctttttcctgtggggacataacaaatacagccaggtttaacatggaagaagggaaaaagggagtgtacttccaaaagcccttaacctactgttgttccaaggtataaggtaaccaatgagacatttgtatgctatttttagaaagacattaaataacacaatttttagtctttctcactgcaacaaatttatctttgccccaagagagtgctgcctctgtctctccgtggaactaaactatgatcttcccagaggtgtaagaagtttctgagagccctcctatgcccaggcagtgtcctgttcaccatgttggccaggcaatggggatttggaggactacacctaggacagtattccaaaaaagacaaaaaaatagtaaaaggaaaagggggtaaaataaataactgtgtttggcgtgctcattcatattttcaataaatatttattgagtctttgccatatgcctagcactgtgggtgtagtaatgaataagacaggtgtgatctgcattctcatggaactttcacattgtgagattgtaattcaagggatccccaactttttgacctggcctcagaggcattctagcctagtggtcaagggggttggctctggggccagactctttgggttctagttctggctggacctactactgttggtttgcctgaatttggacaggttactgtattggttaaaggcagttaattgcaatgcaaacctcttccaacttttagtcaaatctgtttttcatctcttacacatgaattgctcattccagccgtcagtactttgtacgtattttcccctacttcttgtccgttgatttgtctataagttgctcaaagagctcaaatcttgtgaaccctaagaagtcttcactgataaaccccaggtcatcttaattattatttactccctcctcctctcacctgcatttctgttccaataaccttagatttccacaataccactctgacttgttctcacttctgttgtcatctctgggttcagagaagacaagtgactagcggaagatcacacagataatttctaatgttagagctggaatccaaattctagtctatctgatttcaaattctgtgacttttgctatgctctcctgacttctatcacatcatagaggagtctaataaaatatactatttcaatcactgacattttattgagtcttcactattttccaggtcctgtataaaatatacataattgctatacatattaattatcatattttattgtattttttagagatgggatttcaccatgtttcccaggctggtcttgaaatcttgagctcaagtgatccacctgcctcaggctcccaaattgctgggattacaggtgcaagtcactgtgcccagtatatgaaatactaattatatattatataattattaacattttagaggctaataattatgtctatcgtatataatatgtatcctacacacatgaataattatgtatatcatatattatatatatacacacacacacacatatataattatctcatttacccctcatacagcttttttttttttttttttttggagacagtctcactctgttacccaggctggagtgcagtggcctgatattggttcactgcaacctctacctcctgggttcaagcaattctcatgcctcccaggtagctgggattacaggcatgtgccaccacacttagctagttttttgtatttttagtagagacagaatttcaccatggtggccaggctggtcttgaactcctggcctcaaattgacctgcctttttagagatgggatttcaccatgtttctcaggctggtcttgaaatcttgagcacaagtgatccacctgcctcagcctcccaaagtgctggaattacaggcatgagcctctgggcccagcctactcttcataaagctttaagaggcaaatactattattatccccattttatagataaggaaactaaggcttgctgaagttaagcaggttttggccgggtgcagtggctcagatctgtaatcccagcactctgggaggctaaggcaggtggatcacaagatcaggagttcgagaccaacttgaccaacatggtgaaacgctgtctctactaaaaatacaaaaattagctaggtgtggtggcatgcgcctgtaatcccagctactcaggaggctgaggcaggagagtcgcttgaatctgggaggcggagtttacagtaagccaagatcacaccactgaactccagcctgggtgacagagcaagactccgtctcaaaaataaaaaagttaagcagatttcccaaggtcacaaaacaaaaaagatgaaatttgaatctgaatctgtgaatttgtatccttttcattatttgtgttttactgtacttagtacactggttgtccaacagttatgccaaaataagtgctaactgatcattaaattatatctgagttcctacagccttttcttgagcattctctgtactgattacgtgggctgaaagatcaatgggctttggcttagtgtggattttctgggcttcctgaactcttccctggtgtgatgtcaagtcttctgataagttttcgtctctccttaggtctttcaaatcccaaggtggtatcaagggctgctgcccagatcccaaactcctaccacggcttatgggtgcctgggacagtcccgaaggcctaaggtcttgctcaatcaatggccttgcattggccctgagattctgattacagttgttttgcaaataatgagaaatttgaaaaatattgctgtcccctaaattgagccagtcctaacactcacaaaatccataatggtatagatacccagatagaccttaactgtgatttaatagtgctcactgtaatttagccccagggaaatgtgctttcaattaaccaatgtaagcacaatgtctacttatcccataaatgttctcctaaatgtgctaattaagacctagatccagtgcttctcatattacactctctttcctttctcctaaatgcctctctacttcaggatcactttatgcttatctggagtgtgggcatagtagtctattgtctgcctccaattttgccctatgtgccttaattcattctctacagggcttaaatctgttaacaacgaaaaacaaaaaacaaaacccctttagtgactcaccctgtttaactacactctaacttctggcctcctccatattatggcctctcacccacccttcctgtctcatcttctatttttcactaacatcatccaaactcttctacatccaggtctctgtgctgttctctctttctgaactactctacctccatctgttcacctgaaaaccccacctcttccaaagcctccaagaaaaccatttggtaaccaatctgcttggatatggcatacttccctttcaacttcatgctgatttacctgttctttcctaatggaatttagcatatatgtcctttgctcctactgctgcttgagtctaataaagaatttgaagcagtagttttgtgtttatgtaattatgtatttgtcttcttctcccaaccagagtagaaacttcttcactagggcaactttatctctgcatcttcacagggatttgcacacagatgcttcataaatgacttttgaattaaactgagttaggttgaaatgataggaagtagaagggaacacactaactattgagctctttaagaaggcaaacagagtgggcagccattaagtatccccagtgttcgagagtattggtcctgcttgagtgaatgaccagctgaatttcttcattcagaggcttcacccagatcatgttctttacccctgaatagttttcctagtcattcagtacaatccttaagacttgatcaactatcagatgacacattcttaaagcatcttctcataaataaataactacaactgtcaatgatgatgcaatggtggttgtgtgatagtacttgaatcaggagtcaggctatctcagttgtagcctttgaaatatcatttaattgccgtagaactggggaactgagcctgagttattttatttgtgtgcctctgtacacaacaatagttagataactggagtgctagcagcatgtcgctttatgatctcacacatgctctggatcagtggtctgccattctgaatgcccattaaaatcacctggggagctttaaaaataccaatgtctgccccaacccaaccaaatgttatagtctctgaggtctaccaagcatcagaatgtctttaaagctccacaagtcattcccaagagtagccagagttgaaaacttctactatagaccaaggcttctcagattttaatgtgcatgcaaaccacctgaggatatttccagtctaattttgtaggtgtaaggaggggcccaagaatctgcatttctaacaaactcccaggtgatgccaatgctgctagtgcatgcaccacactttaaagaataagatgcaattgattctgtataagttccttgaaagagctgctcttagaaggagccatctgactaactacatgccctaataggtgcctccaggatttaggtgcttgtctttcttcagattctggggagcatctaagagtgtccaacttcagaacctatgaaatgctccagaagcaatcaagacaatagatctaaatagagttactgacagaagcagatgcttcagagactagcacaacaggtgggtacccaggaacattgggtgaaggctagcacaaggctttaatgataaactggccatcacatttctaacacccagagtcccacagttcctagcattctccaagacatctagacaatgcattaattaattcaagcaaaactaattgatcacccattgtggcagtcatttatttattgtctcccagccccaaactcacccttctacactctgatatgtaattctggggctgggactctgcaaaccacatttatcctttgattgctcgctctagggtgaccaattgtccccattttcctaagtctgtttcccattttagcactgaaagccttgtgcccaggaaaccccttattctcagttaattattctagctggcttgctgttaggttctgcaaataggtgacattagggggagatttaaaggagggataagggtctgtcttattcctgttttgtttaccattcctgtcattgctacctgagttagtggcaggtaccacccagcagcagcagcagcagcaatggttggttccagcctccagctcctttcagcacaccagagccagccttgttgctttgtctcagggatgccacagcatctgggcagctccgtggacctcctcttctgagcttctaggttctggtgattcacctctgcccttgttctccagccttagggataggttgctatttcctgcatttatcatatctgggttatatcagtgagcatgctgatatgctcttttagtccttcaacacctgcataaactgtttcttctattaaattccttctgatgatttatttggtgtggttttcctgactagtttctggcttatatatttgttcagtgcaaactactcagttggacactagaaatattaaaataaatatgacacagctgcagtcctctagtgggaggagagataagtgtccttattacagtgtggtggggacatgctgggcagaccacacaccaagtgttaggggagcccagtgtggggagttcccagaatagagagtcattgaaacgtttctggggaggggtttttgagatgaatttcaactgaggcttcagcaaaactgaagaaaggagcaaagacgcttcaggcatgggaaacagcttatgctaaggcatgaaggagtgtatgtacagcaccgtatactctgggaataactctgcatgtccagaatgagaattgtgagtggagaagtaggagatgttcccgctctccatggaccttcagtgctgagctaagatgtttggaatttatcctgaaatctttaagctgttaatcaaaggttttagaaggggctaccactccaagtggaaaattgagaaggggagttgacatctactagttgggttttaagtaagcttttgttcaatcctataggctaggaattcatggtcctgtgttgtaagaaataggtgattgctttaaataaagacatggaatattaattcaaatcaaggtaggttattcctttaggtacctggacacaccacacacacacacacacacacacacagagcctagattatcttgttgaaataacataaaataatagaatggcttcttttgagggcacattaacaaaattggagcatcttagtctgtcatgaagaaaggagtggctattctgatggacaggtatatatatttaaaggttccagagagtataaaccagactttatagcaagtggaggatcccttaattttcaggaacctggagaccacctgaacaagaaagttacctgaaaaaaaaagactcaactgtgagacacaatccttttctcaagctagctagaataattagctgttctggtttacctgagactaagaagtttcctgggacagggccctttcagtgctaactacacttgtgggcaagttgttgaagataactagaaatacaaagacaatgtgacacaaaattctctggcaagtcggggaaggtgtagacatggactccagaggtctctgccatcagaattgctggttgttttggggaagtgctatgagagactgaaaaggctagtgggaggttgagattacttaaatgcactgtttaattttttttttcaataaaagtctaaaagccaggctttaagcctaaagtgctggaggctattagccacctgaggcaaggcagttaggcacaggtgtgccaggctgccaaattacaatgagtgcacatcccaggttcagaatatttgaaccactgggctctgtttgatgctaaaatgacccattttgaaaccaataaaagaaaatgccactttacacagtgagaaacaggcattaggaacatactgtccctttggaagagtccccgtggtataagcaacattgaccaagctccaggggttatcttcagggacagaagcccccaagagagggaggcatcagtcagtctgagtggtcgttatgggtattttggtcatcatcacaagaaataattgggaagatcttgctcttgtgtcaaatccctatcaacctcaatagggaaggcaccaggttcaagaggccggagaagagacccagagctagcaaacgagacacagggttttactaggggcctacatacacaggagagagtccagtggtggtgagctggacagaagagccgccttatatacggagaatgtccagtggtggcaggctgtacaatatatccaccttatgtacggtccagtggcggagggctagacaacatatccgccttatgtatggtccagtggtggcaggctggacaacatatctgccttatatacagtccagtggtggtgggctggacgacataaccgcatggcccagagacagcaggctgggcaagaaaactgcaaccacacaaacaacatgcagtttatacagcattttcacttaacaccctccccttaatgacttgcacctggcaaccttcatttaacgcaaaactcagggcctcagtgccctgtacagcccatgttccatgggatgggatggggccatggggatggtggtactcagatgtttctcatagacaagacatgggtctccaggttgcctagattccccagctcgggacacacattaagatgcatctaccatacagggtcattctaagggtatgcttaaggtattcctgttaggtgtgtttatccaacacttggaatgtgctgcactgaggtttaaatataaaactgcaaatatccaggagatggagagctgtgtcagtattgaacctgagacagggctgggacgattcagtggactggaagtcacagaggtggtcatggtattatgggacctggcaacaaagttgatacatacatgaaagtggagaaacagagaattaggaaggaggaggtgattgtcttgtcctgtcctggtcatacaaacagtgacttcaggccttgccatgatatatttagagggatattgacaaactggagcactagctgaggatgaagattggacagtgagagaggcaagcactgggaacattcagaggagaagaaggatggcccacgagaacccactcactatgtactgacacgtgatgggctgtcttgtgaaagaggaattagatgggtttggagagggcccagcggggagagccaggatggatgagtggaattccagggagacagattttgatttgatgaaagggagatgtctgtggcagttagaactgagctccccagctatggatttggctgccttgaaggcagtgcctccaaaaagtattcaacagagaaaaacaaacgggccctcagtgttatgcccgtgcacatacgaatgtgattattatctcaccctgctttattttcatcattgcacgtgccatttgcaattgtttgtttctgtttccttattgattgtctttcttccgctggaatgtaaatcccatgagaacaaggaccttatcaggcttatttgctgctgtggtccaagaacctactatggtgcctggcatatggtaggtggtcaatgaacattgggtgagaaacggaaggctaaggaagggactccatcaccgtttgaaaggtaggtttagaaatagcttctgagacaagaaaaaaatatctttcttgaataaaatttctcatgggaccccaatattcaaaatcaattaatgtggcattttaatagtgcacatttatgtcataagtctcactgttaaccgtttattttacatatagtaagaagagtcactgagaatgatgagattgttttgataaacatgataaaacttttgaaatcaaggctactagaagacttagaatgtaatgtattcctctattttcttctgcttacagagcactgggaaaaccctgattcatgcagagaagtagttgcaaatgatatcagtctgcaatagctcatctggcaatctcagggtaattcttcaattaaactgatggagaagcttgaaaagagagtagttggaaaattgagcttggaagccaaatctctcacagtttgtaacagcaggttgtgcctcttatcatgcattcaaaagtcaggcaagaagaggcaaagcttacaatgaatgccaatgctattttgatgtgtgacattatcatgactctgatgagttacacatttggttataattgtacaaccaaccattaagccttgggagtcaagcaccttctccttgcctaactcttaactgaacacgaggctgtgtctctgtgctgtggaactgtctaattctccagatatagaggtgttcaggcataaatttatcttttaaaaaatcagcacaaagatgcaatcttcatagccaataactcattttcaataagctctggtgtatatgtataactttattgggagaagagtcctgagaactacacaaaagtgtgctggtaatacaggttaatgtattggtgctaaaatttggtacatggcatatttaagttgcatgttattcttttaaatgaattttactaattaaaatatattaaaatgaaattataattaaaaattcttgtaggatgaccgtggcatttgtacttaaatgttactagaaaaagcccaaattaagggttccttgtgaacctgagattctccaacactggatgggatggagtcataaccttcaagacatgtgggcaggaccatttagatcacggcaaggagggcagagtaagatggccctaattatgggctttatcataaaatcgactgttgccggcatccaagtaaacaaggaccatgacacccagactctctgccccaacattgctgttgtgacaaagtgcttctgccatattggataggtcaggtgagcatatgaaaacagagatgatagtcatctgggaatggagagtaaccggtcttcaaaactttatttcacagagatggtggtgacttgcatttctgtaagccagcaaaggaagaaataaatttcctcaaccaatttaaagaataatccagctgacagatataaactgtcaacctgttatttagctctattagtgattgcaaatatcagattatattagctaccaatatttattgaatacttactatgtgctagatagtctcataatatatttatataaatttttttatttttctagcaatcctgggatttccatttttgagtatccccattttacagatgggaaataacagatgttaagtaacacagatgttaagtaacttggctaacgccatgtagccaatgtacagtgaggccatgattcagaaccacatactttgactccaaagcctacatttttaaccacattgaaaatatgaacagattatgggggaagctaggttcaggagctgaattgtccagtcataaagtacctagggttttagaaaaaaattccggagttacagaattatctaaaattggataaggttctgcaagtcaagttagtgctatactattgatacctaattctatcatttgattgatatccagttatattgattggttcttaatttttatcttagcctatagtaagacctttttccatctcatggaaacgtacctccaaatttatcatgtatgccaagggaaaactgatcaactctccaccattttgttttacgagtaatattaccagaatgcttgtatttcattgagtgaagggtgcacctgtaaacgcagcattgaacttggaggtatgcagtgggtggtaagagagcagccttgaatgaaagagataatatggtatagtgggaagaacatacatttaggaggaacagagtggctctgcaactacataattgtatgactttaggctgttcattgaatctctctaagtctcaattttccaagttgagaaatggcgataatggagtctcatagtcctgctgagatgatggaataatcgtattttgaatacctgccagatagaggcaccttacctgttagaactctttctccccaccttcatctttctcatgcaatgtatatacatgattagaatgacctcatacatccagcatataaaataaaagcaagtgaatatcttatcgtatattgtgacaagggattgaaaattctaaagaggtgtttataaatacctgaaaaaaaagcttgtaaggatgaggccacattatttcagagtccctattgcctccaaccttgccaaaactgctattagcatttagctgtttagctaaaatgggccttttcttcattgtggacttcctcttatgactttcgtattggcgaggggactttggaaaattcatgcaaagacctaccacatagtcgttttctgaactgcagaattttgtctaagattataaaggccagaaatgtccaaagggaggagacactggatataaacaaaatgaacaaggggaaagtagaaagagcatttaaatgcttccatgtccaggcccagtgtgcacaggctttctggacatgctatggcttgggggctcttctcccgggccagatagggagcaggttctgggagtcagctcctcccagattgtacctgtgagaggaaattcagctgacagtaaacaacagccaagggtccagtgcttgatcttggctgtaatgcatgccccagtctctatcaaaggccaatagccacttgcttcacctgcccagttctgctgggtttgacatgctgagttattttcccttctcaagttggcctcactaatagctctgattgccaagcccttcataattggccttgttctgttgaatctgatctgcagagtgggatgggggaggatgcatgagctagctctaaattaagcaggtaaattaaagatgtgtatgatgccaccccaccaaaatgactatttttcagttagcttaactggcatttccaatctgactcctttcaaaactggatgtttgccgttaaacacacatgcacacccacccacacacaataacaccgtctacttctttcacagcttatacctgtgagcagctaagattctcagtgataacttttttttttttttttg[135 bp omitted]tcttccctgggacatgattctccaaggcagagcccagaggaccagaaaaccacaattttcaaacccactgtgtcatctcctcttatcctgtacaattccgtctcagctcctcaggctctcagcaagttcttattcccaccaggagaactttcctagcagcagcaggaggagtctccagttccagccaggaacatctaaacccaggcacctaaaggatttggaaatagctccaacgacctctttgcatcttctctggaaaacagagacttctgggaggcatctagtagggcagaaagaggagccttacaggagaaagtttctagtagcttcaggctctaccattgctgtgcgttttgggaaaaacccacctgttttccttgagccttagttttctcttctgtcaagtggggagagtaacaccctgctttatccacctcacccagcccttcatccaactctctgccatgaggttaccatccagtaagagtcaatcctggggaacaggccttgcagacagcccccatcatcaacactttctccttatatgacctgacactctatttcctgccctgtttctgcaattctcagcaactaatctccaggctctcttcctgctcatggctaggcacacataaacctttggaataaggctgaccctgctcgctgggtacagtcactcttttcccacactccagacaggatactactgtgctctcagcttgcaatagtatatgggacacagcttactctccctgctaattcatcagccaacattccttgagagtcttctgcatgccagggtgcaaataattgaatgagagcatgcctgttatcaaagatagtctagaggaagaggcagatgagcaaatgacaaggcccggtgatgcacagtagcacagaggaaagtacaggccaatgggagcccagtggaggggagcctgggaagccttcaaggaggaaaaaagaagatcaagtgttaggcaggcaaggggcagcaatgggagtggagagtacaggaagcatctgggcaggagatgcaaatgcaaatatatggggaggaagaggagaactcactccaggcactttgggaagtgaatgcattgtctctacttgacagaagatagccaagagctggaagaggcaaagagatttgcctggggcctcacagccagtagactgcacagagaaggttaaaatctacatctgcttacttcagagcctgagctctttgcattacacgctctgcctttccaagtagagggtggtcaaggcaaccagaagggcagccctagatcaaagcagaaggcactgcagcctttgccagaaatcccattctactggagctaacatgggcccccgaagcagccacgtttacatttcatccttgccaataatgaacgtgccaactaaggggcaggcaacctaggttacccagtggggcatcctttttttctccttacatgctcaacctcttaggtcttatacctcctcttcctctgctctcttgaaagtgagctactgcttgggagggataatggcattgctcctgctcccttgtgaatgaggggtgttgtagcccaaaagcaacagaggacaggcactgagctgctggtgccctccctgcttcaaaagggccaagctttagaggctctcatgcccttagggactcatactaatctttttatctagttatttatacaacattctgcagagttgacttgtctcgtgattttacaaaagagcaaaaataacaacgtcagcacttcaggtgcacagtaattcctaattccctgctccccaaggcattctaggcagtagctggatggtacagatgaaggaatggagaggtacctggaaggcaggcaggcttcactccaggggctgacggtgttactggacaaggccctcaacactctggggttctgccaggcaaaataggaaaatatgggaaggggaggcagggataaaagtagtatttgttaaacacattatatgcacatatctattttatccttacaacagataaacattgttctgattctacagctaagaaaaaggaagctctgagaggtgctaattcctttgttaaagtaacatacctaggaagaggcagatcctgcctactggctgatttctgtactatttctgcatttatgtttcagaaaattggcctaatttttacaactagtttgtgctaaagtccaaagtagaacttgaatccttcacccttctataccagtgaataaatgtgctcattaattagtgcactcatgtgcaaacatatctagtgctcactctaggtgagatcctgtgctgagtccccgcctgctaggagcttcttggtaagaactgggatcctggaagcacagagggccatgagaacccaggggaagagcaagcatgaaggacttgctgtccgctattagcagacactggctggggactagtgctctactgcagtcttaactgagcctcaccagggccctaagaggtacagatcattatcatttccatgttgcaactgtggagactgaggaatgaggggtgctgtgtaacctactcaaggtcccatggttagtaagtgactaaaccaggatccaagcctacgtttctctgacacccaagtctgttctcttaaaaaccatgctatttccctcccagagtcagggatggctgggggtcaccagggaggtgatcatggaagccttacccagggggtgagacttgccagggaggaagccttccccttgagtatggaagggtgattaagagttaaccaagtgaagaaaggggaactgcaaatattctggaagactgcatcagagactgggcaaaagggaatagcactgtcaaagcctgaagaagcaagcaggactcaggcatggaaaaacctttcatgccatgaaaaggagtttggactcctgaaggcaacagggagtcaataagggcttttttcaaaggaggaagctgatcagatttgcattttaggaagctcacttttgctgcagtgtggattggattgaggcaaagctggaagcagagaaatcagtggatgctgttatagtcctaggcaattaattacaaaaagtaacaacagtagatatacaaagtattttttgaattctgctatgttaaaggtatgttgtttcttaagagggggaaacacatcccgaaagacatggttcttgccttatcgaagattagagtctaactgtgcttatcattcttccattactgttctcttcaggtgctcacaaaatcagggcttatggcccactgaggtttggggatcagttttgaggccaagaagaattggaagggaccatgggagtgatgcaggccgacaaatgaacctgtgctgtatccatttcctctccttaaactgcatgttcatgaaaacttctgtgcaacagtcaaaaataaaataaagtaaaataaagattgaaatgctatgtcctggaccaaagtatctcgtcgccacatatcctatttgctatcatttccccaacattcagaaagacagttaatgggtaccatttttctccatgtttagttcttctcgcataaatttccttaagcctctggctgcaattaccacttgtctgctagagcataccagctgatgacaaagggagccaacaatagcaaatagatattaaggggagaacatgaaaacagttgatctgcttggtttgacagcctgttgttgagttttgctgggggaggggattgttcatggtatgtttcctctgggctatgatctgagagcacacatataatagagtcatattttctgcaggtaaaatcgttgcttgctacttctgatgacagaatggaatctatctgctgtttcaggtgctatgcattgagccccaggcatccagatctgccctggccagatgaatttgagttccctgtttaggtcattcggtcacttaatttcctggcatttggggcttgcagtatctcggtgccattacctgagtccagaaatgcaatcccagcaaaatgacttggacttggccgtcccagcccattaacctggggcaaggttggaaaactacacccaacaccaatcagagccagaggcttggacagccatgtgcaagtggaccttggaaagatccctcatggaagagttaagagacttggtgctagttttgttgctactttgaatctaattttcctcatttctaaaaggcagagatccccaaaggggtcaggtagggggaacaaaatgatttcaaagttctcttccagtttaaagactgtaggtttttggaggaactgcctcctgtcggaaggaactaacagcactgtggtccccaattctcaaggagaagctttcttaggagcagccatcccaccaggggagggccctaggcagagggtccctagtagaactctctcctgtaccctcctgagaccacccaagaggacagggttgatgtattaaagaccatgaggctgggggcaatgatgggggagtagccgaggggtagtcagacttactgactgacgtaagtgcagaaatggcaggggatgtgttggggagtgttccagagtgaaaagaaaggaagttctcttgtcaaactcagtgcctggtttcaaaaacaatcaaacaaacaaaaaaacaatccacaacagcaaaaggggaaaggtctttctcattaattcttgcttccgcttattctagaagatgcaggaaaggatttgtttaaaggtctgaattagggttctcaatctcagcactcttgatactttgttgttgggggatgtcttatgcctcgtaggatatttagctcatccctggcctctaccctctagacgccagtagtatccccagttgtgacagccaaaaatgtttccaagatgttgccatatgtcagtgtgtagaggagcataatcacccatagttgggaaccactgctgtcaatggacaatcagtcttttaggaacctcagcttgtttatctcccaaatggaataacccctgttctgctcagttcatagagtaattgaaaagaaccaaacaaatgagaatcttgttgctgtttccgtgaccagggcaagagtgcctgcaacccccaaggctcagaagaaaggcaaacaagggatcggatgaaagggaccattccgttcaggctgtactcagtgactcaggcctgcgctgcttcacttggactgaataatcttagcttgtcttctgcatgtcagacagagaagatgctagacagccagcaggctgtgcaagcacagagtggggcccagcatctatccatcatcaagtaaggctgttttttattaaggagaacaaggagagctcattttccttccatgagagcaatgaggccttttaccaaagcagttcactccttcttgaatcttttagatatgtgaagctgtgaaaatcaaaggcacaggatgttttctttgtggcaggcatgcatgagctaaaccttcaccattggcttcaggatcaccttacgtcccctttctggtggagatcagaggttgctgaccacctacttcaggtcctctctgtggggtgagatggcaggagaaaagctggtgcctctgagcaccaattatgtgaaggcactatgatggattttacatgtgtaaaagattttacatgatcttaatccacatgtaagtcccatctacacttaataattttgaacttacagcctagaaaccgaaatatgacaaagttaagtgacttttgtgacgagttaagtgaggagtcagcatttgagctgagggctgtctgattgcaaagccatctttctttccctacaccttgctacctcttgataaggacactgtttctccaaagaagagaaacaatttccccaagttcacacagatcttcgatggatactcaaaggggctcacattacaaattgtctttcccattggctcaggagagattctgagaacttggagagggccggtgagcaagatggttaaataaatgggccaccacctccatgatgccattctgtggggctactttttactccagaatgcagtaccaacacaagcactgcctgagaactccccaccctattgtcatccctgatagaggagttcaccctaaagcctttcccccccgtcatagacagttaaaaagctatcagcctttcctcacagtcatgtacagtctcacccacacaagtgagttgtgcacaattttggagacattctgtgaccccaacttaaaacacttctcccacacacaaagttaacacttcagttaccaggtgatgattgagcagagattcttttacaacccagagcagtactaggactttgttagacaccctggagtgtatttacatcctaaggagggagaggggaggtggggatggtagtagaggacctctgtgtagagattccttttagcaaagagtctcagccatggggaagaaactcctgggagaaagggctcacccggcctggcaggggactgactttggagggaacatcaactgtgccaggcacagtgctgggcacacatgcattgattcatttcggtttggcttggagacaacagggccaaagggttcacaaagaaactgtgcaagaaatctatatccccatctgtaaagggacaatgtgacctggaccgtctctaagcgacaactccagttccgtaaggacgatctctaagtgtcatcaagatcctgtaagagtcatgggtggcccattaatgatgccagtggtcttctgcagttccctctgaggcaagctgaaggttcaaatggatttaatcgcagcaggaaagaccaacgtgggaggataagaagaaatctctggctaagttctccaagggcagaactcacccacatttgtatcctgagggtctagcaccgagcttggtctagagtggatgttcattaaacgctgatttgataagtaagagggcacatgtggagataagcatatgagtagccaagagacccagattctgattctggatgtaccaacaggtagacgcttaaccttgacaccttaagttctctagacctcagttcctcgtctctaaacttcccttgcaggtctctactttatgattccatgagtttatctctaaaaaagttgatacatttgcccatcgaagttaaaagtctaagatctatgatttgacagctattctggctagaagggaatgaactcaacaaaagtctattctggtgcaatacatcttctaattgcagattgtccgccccagtaaacgtctattgtttgggaaatggggtaaggaggaggcacatttctttgctagttaatggcctagcatcaactccagctgaattttggaggtagaagagtgagtctgtgtgcttctgcactgtaggcatgcatgcatgtcagtttagtgggtggcatgtctacttataagctgatgtgcaggcagtatgcatgggtattggtcatgtgtgcagaccctcaaggtaaacatgtgtggcatttgttggatgtgcgtgtgatttctttctgtacccacatatgtgtatatccatgtgcatgtttatgcacatgggcatactgtgcagcaatgtttctgtgcagtgaacatatatatttagtacatgtggacatatgtgatgaatatacttgcttggaacatgtgcatatttgcatgtctctgctctggctataatggggtctgaggatactgccccaggattccctcaaagtagggaactgtgggtgggggaagcggcttctttacaggagcaagatctgcagaaagagcagggttgtttcacatgtgtctaagctgtgccaacctgcacatttgggtgagtggcccctgtggattgccttaatgatgtgtgtgcacagctgagtcagctggggctgagacctggggacctctgtcacacaagttgccagctcccatttgtcatctgccctgggatgaactttccttgtgggattgtccttccctgtgggtggtgtgtgttagcttgtggttattagtgtttaaaaaaacacgtgctgtctccagagctcagggggactctctctccagtttcctctggttgccaggcatgagcaaaagtaggaggaacctctgacccaggctcctgctaggggccaactgagttagaaaattagacaggcagagaatgctttccttctgagatgggggcaggggatggaagggcatgccggcagcagaaagtgtggccaaaggagaggtctttagaggttaccaattgtgcaggccaagttgctgggggaaggtgaatgagctgacacacgagggagatgatgggaagctgtgagctgctcctgcaaaagtgaccataactggatctgtgctgcagcaggaaagagctggaactagccaactccagactggagaccctgctctgccccctcaactgggtctgtgagttgaagcagtgccttgtggtggggaaagtgggctttggtcacacagagttggacgcaattcttggttctgccactgaatagctgtgtgattacagacaggtgactttgctttccccaagtcccacataaattcaggtatagtaatattataaaccccatatggttgtttttaggatgaaattaattcattctgcaaaatgactataattttacacagttaagaggataattctttggtggagaagtccctagatgcattattcactggcaaactatagatagatggagtgaaaaatctcatgtgtatccacctaggggcttgactggactgagatgatgatgctgatgatggggatgatgatggtgatgacgatggggatgataatgatgatgggggcaggttgagggtggtgctatgtgtttcctgatgcattctgaggattgtgctcccttttctgttgcctgacctaagggaagagatgaaagattgggatgatccccacatctcttggacataactcagaatggccaactctaccaacttctcatgagacaggagtagccaaactgtggctcagataatagctgattcattttgcacaatccaacccaatagttgttgatgctggtgctatgcctggatattaagagattaaaaaatgataaggtccttactcctgagaagctcacaatttaaaaggagaaaagaaaaggagcaaggaagaagggggagagagaaagggagggagaaggaggaagagagaaaaaagtaagcaatgaactatatgcattacattatgataccacaatagaagagtgtacacaaggcactgtacacagagaggtcaggaacagggactctgacatctgactggcctacctcttaccagctgggtggcttggagcaagttaattaatctttctgtctcttagttttatcatctgtacaataggaaaaagcatcaatatcaatttcatgaggtcattgtgagactttaaaaatgtagaaagcatttagaacagtgactgacatacaaataacttacagtgtttgttgttacagtaaaagttgtatggtagcagtagcagtgctagtggtggtggctgtagcagcagtatcagtagtaacagtagtactagtaatgagggtggtagtagtagtaatagtcttatcagtagtagtggtggtggtggcagtagtaatagtgttgtcagtagtagtggtggtggtggtagtagtagtggtagtagtggcagtagcagcatcagtagaagtggtggtgctgttggctgtagtatcctaacaggaagcagctcagaggaagcaggaattgtttctacaccgagggttaggataagctagacacagagggtgtgctctttgagttgtgccagaggaatggtgagtgtgagttggtgtgttgaacaaggaggctagagcattcattcctagcagaggtcatagcactaacaaagtcctagaggcctgagagaccgcgacaggtagttcagggacctgtaagcagtcatgatgcttacagatgggggtgtatgggacaggggtagctagaaggtgaggctgaaacggtggccaggggccgggtctgaaaggctgtgggtgacctactgaggagtgtgggcttgtcttgtagtcacggaggagccatcctgggctttatttggagtgtggcacccaaggggaccccacctaaggaggatagatggagcttgctttcagcggccaagagctcaggcatactgggggattaaggagggtgtgcattgctctctgctgttctcagttgctccttggcagccctaaaattgaagggtcttaccctaaccccacgctcactccagccaaaccaactctagttccccatgccctcggcccctttctgctgctggtcaaccagtgctgtcccagacatgacgtatcttgactagaactctaaaccccaaaggtcaaaattccctaagagtagaattaaaagtcagggtgtaggaatagctctcaatgtcacagaatataatttacagaaggggaaactgagaaggagaagagcaggtgaaaggcaaggtgagagatgatgggactccaggaccagagaggagaacattctgccctgccttttcctctgtcacaggttccatccccaattcagccagtcaacctcaacacctagacccctttccgctcaggatgaagggaagagaagaagaaaaaacaaaaggaagtgagaagtctaggctcagaggcctctggggccactggtgagactcagatggacctttaatgtcattaaatccgaactcttattttgcagatgcaaacgtcaaagctcagagaggggcatgaactgttcgaggcgctgaggtatcatcttaagagaggagtcaacaggattaggtcagttggtgaatccaggacagagctgggattcaaactgacaataatctatcctctgtgatatccaacatatctccttcagaccttctattttgtagatccagaaacttcccttcatggaagaaaagtaactaattcacaattacagagtaaatcaggggaaaagctacaaatatctgggattctgattcctgaacaggacatggaccaagacctataatgagcagacgcctgttcacagtcagcatcttccacagcaaacctctgtccagctcctcaggcttgcagcctgggttctaagtgggaggtcaagaggacctcaggtaacaccttgcagtgagttcttctgggagaactctgagctctagtcatccacagaattctcacaggcaggtggagactctcctctgtctctccctagggccatcttccactctgggccagttgttcaccccagcctctaccctgtttctgcctcgtccttaggtcacctacccagaggtaggcactgggccacagcctttgcatatgttaatttatgcagccaacctgtgagggaggtaaaacaaacctcactctatagccagagaagcacagcgagtaatgcctgaatttccaactcccatgataccaaagccctctctctatactccccagtgtggctgccctgcagggtccagcctggtggctgcagagaaatggctaatgaagggctctgtgctgccagtccgggagcgattccctctgtgctctcaactacagaaatgaattttgtttagttcaaagacctcattaacgctggggttagcgggagcagcttcacagctgattcatcttcaggaatcaaagacagcctgagtccctgtgagcagtcaggagccgccagcgggacatctctgctgctctgtctcacctcccaggtactactgatagcctgcagccaaagcgagaggcctcaggtgcctttcccagaggactggatcatgggagagcagagctctgcacctgagacctttgggtgtcctctgggaatctccagggacaacccatatgcatcgatctcacccaggttctcccttctagacaggttgttgaaggtagtgcaaccattgaaccatgccagacacaaggaggcagatgtgtactgtggttgtagggagacctagttttgtcactaactgtgtgtgtggcccttgagtccctactcagccacatgagtggattgactcagaaattcctcaaggtcccttcaagatttgatattgacatggcccagactgtccaggaacagaaactgccattgaaaagataaaccatattcattcatgtagtcaatatctgctgagtatgtactacatgccattcattatgtcaagtgctagggctgtttaagaccaactgtgtccacacacataaatctcaataatttaaagcagcatgaaataagaagcaaactagctataaaaataatagtgttgggttatgtgacttctacctcaataccataaataatgatagtgaataacatgtccaagttcaaaaagatatgaagggattctccaggctagaagctatagcctcaattcctagttctatagcacaataaaattgattccaatatcaactgcttagtaggcattcaacaaagatttgttgaaagaaccaggaaaagaaaggaggaaatgaggaaaaggggggaggaacaaaggaagaaagttcattaaagagaggcaggcaatattaccgtccatctgttacaagaaagaaacccaagctcaatcagagattaagcagcttgtccagtatcacactgggagcaactgacagaacttatgtgtagagtgagatccctgttggctggggctgcagggaagatctcctgaaggcagagtgagtggagaaggtattgactggaattcaacaaaagcgctggagctggcagtgaaagaggccatggtgacatgggcaggggatgggtttacttattttatttggttattgttttgagacagggtctgccacccaagctagagtgcagtggtgtgatcatggctcactgcatgcagtcttgaactcctgggctcaagctatcctcccatctcagcctcccaagtagctgggaatacaggtgcatgtgctaccacacctagctaatttaaaacaaaattgtagaaacggggcctcactgttgcccaggctggtcttgaacttctgtgttcaagcagtccttctgccttgaatctcaaagtgctgggattacaggcatgagacaccacaccgagcagccttttttatatgccatatatttctcacatagcatcagaagaacttggggacagcagcttggggtagtgtcatctgaatcttggctctgtcacccaccagatgggtggctctgaggaaggctaagccatgatttcctcatttttaacatggagattatggtgcctacattctagatttttgtaagaataaaatgagataaggcaggcataataccaggcataattcttgctcaataaatgggaggccttcaccttcttccctccaggtagaaaggaaggggaagagaagggcaggctgcctagaattcttaagatgggggtataaagtcaagcaaaataagcattaccttcctttctgggtctgatcctctctctagtggtggagtcagtgaccatctatgcagtcagattcaagggactactgtcctttcctcctgggggccagagagcctacccagaaatgggaatgaagtgctggaattattaagaagcctgagtggaacaataacttttctggtcatttctttccaatggttgacttttccatgctttacacaacatgggagttgcttgcttctccctaagaagtcagactataggctgagtaattcctcaagtaaaaaagattggcagctaggaccagaatcatatggcataattatgtagctgagccttccaggacttctcactatgcctaggtttttatttagttttgtttccatagcatgaattgattctttcacagatatatttttgctgccattatgaagctcaaagttaaatagtctatcagtcatgtatgcagatacatacctgctgaggtagacaccagttgaccattcattctgtgagcagaaatgattgtgtaccaaagacatcccacacactgtgctagacgctggaggtacaatgttgagcaattaaggcatgatctctgtctttagcagccttggtcactgaggatctagcacccacactgtgtactaaagtgggagtaaaaatttgcactgtccttttggaaagaattcagtacatatctgtcaatatgtatccagagtctgaaaactattcttttttaacaacaataattcttgaaaagaaagtcacctgagatattaaatagaaggaaaaaaccccgtgtgtaacaggtgggtatttcttacattagtcttattagcagaatattaaaaacaatctcaatgttcaataataaaggagcatatgctttatgggaaagcaggtagttattaaaagccagtataaggaatttcgaataacgtagaaaatatttaaggtacaatattaaatgaaaaacgcagagttcaaaattgtttatacagtaatatcacagctatggaataatgctttttttcacatttatacagtacttttcagctttcagagcagtttcaaatacattccttaattttgaaattcatggcaaccctttaatagaagcagaccaaaggctattattcccattctaaacatgagaagactgaggcttgctgaggtttacgcatctaataactaagaatttcatttgtgttagaagtatagagagtatgagagaattgtatcagagctttatgtaatgcattaaattttctttatgtctgacaccagctcaggaactttgaacagcctacctcttttcttcccatcctttctgcctctgagaggaaggtgaaaaggctatcactgattgaattaaagtaataattttccacaattgttttggtttgctttccactactgcttaagtgtataggaaagttctgtgtgcctttatccaagtacctctatggtcagacatgatgtcttgctacaatagatgcaatatccctgcacagaaaacttcactgacaattcccgcttactcagtttcaagcaatggcaaaagcaactgggagcaggtgggagaccgtggcaaatacaaagtggtatttaactccctgtgcataccagcatgcctccacctttctggtccctcctgcatcaagcagccccttaagcttgatgcttgagctgcaccacgatactgtctgctctctgaacaaacttcacaggtcacaccttttaccagtgttcaaggttttccttcacccagtatactgttcctgtattctctgccttgcaagagcaagaggccccatccttcaatgtccagctaacatgcagcctcttcggtagctgagtcagactcgccatcctctgagttttccaaacattttgcaaaaccttcttttaatatttgtaacacactgtaatcagatttagttacgtttcaagactgaatgttcaggaccagagaatagacagttgcatttagtcctcacaaaatcatcgtagatatagagtatttatttacttcatttttcatatttgcttggaatttatgtccctgtttttctttttgaaattttattttaattgacacataataattatatatatttatagggtatagatgtgatacatgtataccacatgcaatgatcaaatcagggtaatcagcaagatacagatttttaaaatcctaatcttatagatgagaaaatgggtgcaagtaggtattccaggtaaaatagctagtcaatggcagcagtatccatatttgaactcacatctacttatgtgtctgcagctcttcccataatatccaaccaggtcttccatgactgggctaatgagtgaagtggtgaatgagtcaaagatgttccttgagtttccctccccatgcacccatacacacctcttcttttgacaaaggttgtcacaactcagagaagatgccataatggccagccttctagttcactggacagtcagggaatgcaatttactaaatagagagggcagatggtcagtttcttgaccagcggttgaagacttggtgaagaccagtggttcaccaagcagcatgaagactgcccccagctctcagagcaggggagggaggctatctcagatgactcacatgacatcactgcagctcttccccttccagcttaacccaaacttcctgcatctttctccctgagcaaagagccctagagtgttcaggagcgcaagtggcacctgaacagcccaggactggtcctctgacctcaagggagccagcttatagctaagtcaatcagatgatctgtcttgaatatctgtgcttagagaaatagagcagttggaagaagaaaggccacatagcttgcagcagtagcctggccattctgggccacgtggctgagaagccctgatggagagaagactttatcaggtggctcctaaaagggatggaatgagtagctcagccgcagttcacatagaactctggtatgattcctgcttttgaatccatatgatgcttttagccctagaatgggttgcttgtgggtgtcttactaggtttatgtttcttgcaatggagaaatccctgaactaaaacactggggagcactggacagaaaagctaaggttgggaatgacatggccaaacaactgtcagcagactctggaagcattaagcagaacttgtctcccacctcagtggaaatggactcagcatcaactttggagcctgcaacaactgtctgctagggtccattctctcatgattgctaaaaccacaaaggacttgcaagataatccgggccaccatctttttaaattatcctatagtcaggaacttatttcctgctcagttctctgtcagtccatctggtattgtctaaggagaaattctcaaagtggtattaatatgcttccgacaatctctaaacattagctgatttttctttttaataaagaaagaacaaatcttgggcacagagccttggcagacaacaaaaatctagctataagttaatcatattttttattatgctcacttttacatttacagttacctctttttttgttttttttttttttgtttttgagatggagtttcgctcttattgtgcaggctagagtgcaatggtgtggtcttggctcactgcaacctccacctcccaggttcaagcgattctcctaccttagcctactgagtagctgggattacaggcaagcactattatgccctgctaattttgtatttttagtagagactgagtttttccatgttggtcagggtggtctcgaattcctgacctcaggtgatctgctcccttcggccccccacccaaagtgctgggattataggcgtgagccaccccgcctggccagttaccttctttttatggtgaatgataatattttaccatttatgtggtgatttaaagtttccactatacacatatttatggggaaaaaaagtcaatttaaagaaaaatgtcgtataaataatagcgtaggaagcatgcagatatagaacaaatcatgaaagtgtggaaattacctaacatgtgggaaatgctagttaagcccagccacctatttggcaggtgaaacaggggccccgatagggcaggtagttagccagagaccacccaaccagttcctctcactctcttcagccacacatggccctttaagaactctttctacatttattttgtgatgtcaggtattaaagaaaatagctaaccaaagagttcttttaatggtaaaggggacaggggctggggatgaaggtggaggggagactgttctgaatttcccagcagcgaacaggtaccctatgcactgtgtggagtcagcagggtggcaggtgccttggtggtgtcactggctactcattggctaagcagagctcagggagaaacagatcattggaagcttacaatgcagaggcatagtcatggcctacaaaacagagcattaataaagatcacaaagatacacctaagagaggaaaatgagcctttctgtctctgtaaataaatccatggcttgcaaacaaaaacatgccaggaaaaccaactgcaaatgcactcctagtaaaggagaccagatgtccgtggaatcattttaattaaattgtgagtcaattgtaaaccagagggtggggggttgaggggagtggaattttgctttctaagactgccagatgcaaagtccaattttcaggataatgtatccagggtggaggagcctttccaacatttaattacatattgcctagcaactgaagagatgaacaggaatggagtcaggggacctggggtgatccattaggatgttgatgccccaggttgcaggacacacatcaacaccaggcgatggtcagtgtgttgatatggttcgtccccaggagccatgagatggttccaattatgtgaattgtaagccacattttgttccatttccattgggcggatcaacccagtaacctggcagaattacgaccctgtttccttcctttttcacaagagaagcatcttttctttctgtataaagtaatagatgttgttaaaaattcaacagtacagacatgcataaggcagcaagtgaaaatgtacctgccaggtacagccactattaacatcttggagcatatatttccagaattttccagtcataagctaatctcccttgttctaacctaaatgagatattactgtacatattatttcataatctgctttctttcctctaatctatggtggatgctctttctaaaaaacgtttgttttttgatagcattgggagatatacctaatgctagatgacacattagtgggtgcagtgcaccagcatggcacatgtatacatatgtaactaacctgcacaatgtgcacatgtaccctaaaacttagagtataataaaaaaaaaataaaaaaaaaaaacaaaaaaaaaaacgtttttttattgaactatgtcaaacatatggaaaagtgcacagataatggaaccaacatggagaataatatatagacttttaccagctccctaccaccaagacatactttctattacttcttcctaatcactattttcttccttctcttcaaaggtaactattctcttgatgtcaaataaattaattttgcctaactttgaacttcacatataatgaatcatacactgtattttgttttgtctgatttctttgctcaacattttgtgaaatccaattgtgcatttttatgtagtcatagttcatttttatttttatagttttgcattgtatggttacataataattgatttatccattccaatgttgatgaacttttaggttgtctacagttttgagccattacaaatagatttttatgcattcattttggtacacttacaagacacacttcttagttatatacctaggagtgaaattgccacttttctgtaccaatttacaccccaacatcagtttttgaaagttctcaaatttgtcctttttaatgtctgtattatgtcaaattcatcgtgtgctgaattatattccattgtatggatatcttcatagttttctattgatgaaaattttgattgttttcaaccccccacatatttttttttgaaaaaacaatgcttccataaatatccttgtacatttatctctgagcacttatgtgattattccttaggatgaattcctaggagtgaaattctgagagtcaaagagtatatgtatttaaaatgttcatacttccaggtttcttaagttaattttattcaactctctgattctttcatctgtgtttgactctcatctttctggttgctgccttgaacacactccaggtaccaatcgtcccataaaatgtaggatccctgactgatctctatatgtcaggcaaccttgaatggattgagtgaggaagtggggtccagagatgccatagacctacagatggagatcacagttcacaaaatctcctccagggcctaagaagaagccagtctctgaaatgtgcttcttggattttgtctgaacatctcactagcctaaagcagaagaccctagacttaaagaagctcattcattcatttggatcccaatgatttctgaattgtggtcccttggacacatcagtcatgcaggaaaaaaagaatatgtaatgtgaatgcagatgttcagacactaattgagggccatgtgccagctactgctgcagacgttgattatccaaccacagttggaatctgggaaacagagacttaaggcagaagttctgcaatggagatatggcatggtatatatgtgtagaggagggaacaaacactttcaaaagtatcagaaagagcttcatagaaaattttttagattttctgctatatctgctatatctaaaaaatatttttagattttcaggctggctgaagtttccccagtttaaaagtaggatatgaatattatcaacaactcctctttcctgatcccctgtaatgcaccaggatcttcacggtaatgatttatttatctctagaattttcacaataactagatatatttattattcttccctgtttctcagatgaagaatgtaaggctcaaagagaataaaatgaacttaccaaggttgcacagctagtccaggaagagtaagattaacaatcatctccatccaattccaaagactgggcccttttgccaaccacaagacattttaacaaaaggcaaagcaaaagttcaattaaggaggctatgagggttatcacagatgcaggcaaggggacacaagggaaagactgcctgtctccttcagggggctgaggttctactggggagatttctctccttgggtaaatgcagcagtgttttggagccccacgaagaggcctggtttcagctgctctggcaactgcttgagggcttctgctgtcacaggtagaagacacaggggttctttttctgggatcatgtctatatctttaccttatcaaggcagacaggaaagtgcaaaaagaaatgtgaatgccccagtcacaccagagatacagcactgctgtcaccctctgaaagctaagcagggacatggggtttagggaccacgatgtcagtggcttcttcccaagatgatgcatgcaagtggcaaaattcagacttgaattcacatctcctggttcataatttctgtgtgagaaggtttttctgcagtaagtcattgaagccatttgatcttagcaagagctaggaacatttttttttctctctgagcattagaaatcataaatgtatatactaatcaaatctcagctataatttatttatgtgcccaaaaactatttatggcagggtcaacaaatgtatgtgtgtgtgtgtatgtgtgtgtgtgtgtgtgtgtgtgaaggaagagataataaatatttcagacttacaagttatacaatctctgtagtaactattcaactctgccactgtgggatgaaaacagctatagatagtatgtaaaacaatgggtatgcctgtgttccaatgaaactttatttacaaaaataaatgacatgaaacaactagatagccataagcacaagaatgaagtcagacccctacctcacaccatttgcaaaagttttaatgcaaaatggatcatagatttaaaatgtaacagctaaaaatataaaactattagaaaaaaatataggcataaatctctgagcccttgggttagagaatgttttcttagatatggcactacaagtacaaggaacaaaagaaaaaatagattggacttcattaaaattaaaacttttgtgcccaaagggcaccatcaagaaagagaaaagaaaacccacagaatgggagaaaacttttgtaaatcacgtacctaatcaagtacttgtatcccaaatatataaggaactcttacagatcaacaataaaaataaataaataaaaatgtacaaaggggccaggcattgtggctcatacctgtaatcccaccactttgggaggccaagatgggaggatcacttgaagccaggagtttaagaccagccagggaaacatagtaagaccttgtctctactaaaaattaaaaaacttagcctggcatgatggtgcatgcctgtagtcccagctaactgggaggctgaggttggaggatcacttgagcccaggagttcaaagctgcagtgagctgttatctcagcactgcattccaccctgggcaacagagtgagactctgtctcaaaagagaaaacaaaacaaagcaaaacaaaggatatgaatagataatcctccaaggaagatatacgaatggcaaataagcacacgaagtgacgctcactatcattagctatcagtaaaatgcacattgaaacccacaatgaaaatgccatttcacaacctctagaatagctataattaaaaaaaaacaaagaatattaattgttggcaaagatgtggggaaattggaaccctcatacactgctggtgggaacgtaaaatggcacaagtgtttagaaaatcaacctggcagttcctcaaaactgacccagcaagtccgcttttaggtatatactcaagagaaataaaaacacatgcctacataaaacttgtacctgaatgttcatagtaccattatttataatagtcaaaaagtagaaacaatctaaatgtccatcagctgatgaatgaataaattaaatgtggtatacctacatggtggaatattattcattcataaaaaagaatgaagtatagatacatgctgcaatatggatgcacttctaaaacatcagctaagtaaaagaacaaagttagaaaagaccacatatgttatgattccatttatataaaatattgggattaggcaaatctgtagaggccaatggaaattaatggttgcctatggctaagagtgagaagtgagagaaaactgggcagtgactgctaataaattccttttttgggataataaaaatatcctaaaattgattgtgataatagttgcacaactctgtgtttatactaaaagccattgcactgtgcactttaaatgagtgaattatgtgtaatgtgaattatatctcaataaaagtgttacactgaaaaacaaacaaaacaccagatggcaggctgtatttggcccaatggctgtagtttgccagcccctgatttacaggatgtcaggtatagtactagacacagggagcatagcagaaaaaatgaaatgcatctcttgctctgatggagcatagtctagtgataaagacagttgccaaacacagaatcatatctaattgataccacattagaaaccgtaatagatgcttcagataaaaaattcagccgagagaggaatggaccaagtcaagcaaagccttgtgggctgtgatgagaaattctgttttttttttttttttttttttttttttgtctaagcacttcatcaaaggctctctgtggttgctgtttggagaatgggtttgggagagagaaagaacgaacacagaaagaccagcaagaagcagccagagatcccttgataaagtgcttagacaaaaataataataataaatttaaaaactagaattcctcatcacagcccacaacactttgcttgacttggtccattcctctctcagctgacaggcatttagagggtaggacaaaaggtcatggtggtgggttgaatttggtgagggtacgggaggaagaattcagggtgccaccccagttttctagcttaagcaggtgagcagaggaaagtacaattttcggaatctacttgttgggatgagtgggtgggtgtggggagaaaagtctcaggccagagcctcttagaaatagggaaagggagctattcactaatcaattctcatatatttgaggttcacctgaaaggtctaagtgttgacaactcttagaacagatcttctccatctgtgcaattgcaataataaacttaccttgttagatgattacaagggttaaattaattaatattgggaaaacttttagaacaatgcctgacatatgtaggcttaatataagtgctaaacataataaactctgatggctgcttcagtaggaaggcaggagctagagagataagacctttgccttgcaaactgtcctgaatgcgctttgcttgtgcccaccccaccccctgagatgctggcatgaagctgggcatcttggcttcagccaaatcagagtgggttttccttttgtgcaagatgtgagatgccatgatcaagcacagagtgactgtcccctcctcctctcccttcctcctgcatgggcactgagcatccagctataggctctcccggatagatgccagattccttctagttcctgtgccctaggaggatggaggagttcagaagctgaatgaggctggggcactcagagagggtggacatcacagggcggagggagaatcagactgcagcaagttaacaccttgaagtcattaaaagccctctacaaatggaaagtattttgggcagcacttgaagaaataacacacataaagctaactacctgcggcaaggcagcagaggcactgccacaccctccagcttctctccacagtgtcaaccccacctccttctccctgctcatcttcactttctgactttcccagtttccaggatggacaatgagtggagaaggtcctggcgggcagggagcggctaggaaggaaggaggggtgtgtgtgatgcttttctccaagcatatacccttgtcttgctcaggatctggagagaggaccctcccaccctctccattctagtctaaaggtgtcttctctcagggcagcctccttagtaaggtggggacctttgtgtcctcagagtcctcagaaggggactttgccacctgaattacgggaggaggagggatgacagctaccggaaagagggaggctgatgaattatgtatggctggaggtgatagtaaacagtctctggatgatgagctggcggcagacaggcagcactgggcgctgagtcatggcaaagggggtaattagtctgtcagctgtacacacctctgggtggggtgaggttttgggctgagtcacactctgcagagggagagagagagagcttggacctcagaaaaacaaggagggggctcatgttcttgatgagccatgctgttcttgagatccctctctcctcccacttgcaggctcaggcccctccgccaccctaccctagagtcaccatcccatctcccttgcaagtgactcgcctggaccagccagatatcagccaggagggcattaggacttccctcccctcagcagagagggggtgtaaatagtcttctgttgcttcctgtgtttgaggtccccctttaagcccagcctgagaatcttggagctgagcctgaagcaaggagtggggatgacagaccttacgccacagaacatcgggccacagaagcccaagatagagggaagccaagaccctacacacagcctgaaccaagtgtcagtctgaggggtcaggcaggaagatgagcaaagagatggagacaccaagatggatagatggattggctcaatcattcagtcattcaacccgtatgtggtttctgaggactgttatgagccaggtattccttcagattctagtgatacagagctcgacaagagagctcagacacctattctcatggaactgttagagtcagcagatattattagctagacctgagcagcaggggcagcccttgagaaaagggaggtctggagaatctcacaccccagagatcacctgaaacctgcaagctaggtatgagcagaggaggggaaatacctatgctggaaggaacaccccttaagacccccagtaatcgctcacccagcagttcacctgtcagtttgtcgctagctacatgctgataaggaggagacgagggcaaaggagaaattccttagagatacagaggcacattaagtatggatctgaccactatacaaccttcctgggtggcggtaatgagcaatgcagccataaggcagcactggtaaccaatacctggcccacgcatgggcaccagcaaatagtaaaggagggttccacaagcctggggtgggaactaggcaaggggaaaggtggggactgaaggcagaagcaggaaaactagaccaagaaaaaggcagagacttaagacagagacaagaacttcaagaaaaaatctgacatcataaaaacccaacgcagaactcctgggctgttgccggcccattctccttcatcagcccactctgcctcatctttcagagtgtactatctctctaaataaactctttgctctccattttccttcaatacattctttttttggctaaactgtctcttggtcaaaatctttctcccaagacgacaaagataaggattatcccccttcccagtaacagaacagtatgatgaggagacagacaaattacacgtaagccatgaacacacaaactgacttcagagagtgataagtgcttagcaggaactagaatgggtgattgactggaggaaagcctacttaagctacagtggtctggctcatgctgagtagtgagtcaggacaaaggccaagaccttctgctttgtggtggggattcctctctctatgtccttgacaggcattgtggtgtagagaaaaagtcagaaggatttgggatcattcttgaggccatcacttactactgtgtgaccttgtataggtttctttacctctctgagcctcaaaatccttatctgtaaaaattgggtaataatatagatttcagtcttataaagaattgttgtaaagattaaaacggggtaataccatgtacaaaagcacccaatgcaaactttcaaaactcaggcagaagtaggattcaagcccatgcctgtctaaccttgtgcatagttcatcccacccccaggtactagtgatacctccagagagaatgagaatcatgcccgaccgttttggtgcctagaagcagatgcctcaagctcccctctttgtgagagaatagtctatggccccaactcccttccactggtcttacctctggcacttaggaggaaggggctgaaacctatgtcatagccaggcagctggggcttcctgcctggaaccagttctttcaggctgaattctgcttttagtctttctcatctcagaagactttgagctaatggcctggagcctgggttttagccccacgtcttcgggcttggcctctcctaggttctaatattaatcaaattgcactactcaacttcaccctttctcctaggattcggtagaagtgaccatctagcgatgccctggtgaaaagagagaatgttgcctctgtcacagctggctgggcccccttggctccaagaactccttagaatgtctattttacccttcttggagctgaccatacgagcagaagggatgaaaggactttagacctctgcttcaactagggctgccggataaaatacaggacatcaactaaattttaattctagataagcaataaatatttttagtataagtatgtcccaaatattgaatggggtatacttatattaacaattatttgttatttatctgaaattcaaatttaactgggtgttctgtattttcatttgctaaaccaagcaaccttagtctgaagccaaccattcttcctgccgtgtcctcttgacctcgagccccagttctgataatggcttaacctcgtctggaactgggccttgcccccagatcagaaagatgcaactttgttcccctgccactgagctgctagatggtaacccctttcttcataccccaaacatcctgacttcctctttctatcaccgtcctactggcatccccaccctcctttgctggcctcatgccaatctctgctggccagtgcttctcaatagttcctgttccacagttctccatcactttgttccactgcctgaagttacctctggtgggagtctcctgttgctgatcaccacatgctttttgagtatctttttctaaccatgtggctggctgattaccggggaccacacctatgaccagtcttgcccctccttcccagcagtattcctgtcctgataaaattaactgccctcccccatcttgtcccatgacaagctccagtgacaaagctccaaggcagctagtttttaagctccaagagggcagggatcatgcatttgagccaatatctactggagctattcacctggagagccaaagggagtccaggaatgcgggaataatgcagggattggaatgtcagtgctgtggggagttgatgatttcccatggagtggaaaaaagtgggctcaatcacttaacagtaccagtccatagtatatgctcagttaatatttgctgaataaatggaaatagaataggaaactgaggctaacacataattggactcattattgttaaaaatagaagtccccctgatggatgagcagagttttccagaatactgctggccaatttcacccagatcgccatcccagcatcctcttgctgcaaatgctttttataacaacacattataaactatgtagttgctttggcaaaagtggctcaaagtgagagaactctcaaaagacagagacagctgaaaatgaaaacagaaggtttttaggccactgcccctcccagcagaatcctcggtcatatatgggattttgtgtctcctttacttaacagccactcagtccccaaagccccatttcagagactttggggagccaagttcacctctgaacttctgggctagtcattttcttgctcctctccttaaatctttttcctgacctgccctccccaacttctatctgtgcactaagaagatgcttaatgaatatggcagaataaaaactcttggctgtctcatttcactcaagccaaagtgcttgacccacaggaaaatgcttaactggatggattttttttttttaaagaacaatctccttgaaagggtaaaggacctaagagtgagtgctataatcccagcttttgtaataccactcaatggaggtctctgaattccagtaaagagcagtgaaattttattatcacaaaaaaggagaaaaatgtttcaattagaaaaagattctcaattgtgctactttaaaagaaaataacttcatatcaaacatatttaaaataaaaaaataaaaatgggtctaaacgagtagaggagcatattattcaaagtacttgggatcgagattcaaaggactttggttcaagttcctgtgctggcacttactggctctgttatctttgtttctttgtacctctgcattttcatctgtaaaacgggactacggttatggccttctgtaacaccatagggacacagtgagaatgaaatgaaacaggaaaggttaactcatttcactccttgagaagttatgcgaagagaagaggagtcttagtgtcacccacatggaattgcccaccttggaagactctccagaccttgttactgtgggtgcctaggatacctggtcacttggtgcatgatgtggttacaaaacaagacttcgaagatccctttgaaaccacaatatctacgattgagcaaatgttttaaaaataactctaacaaaacaaacttgagtaatttatatttttgagctccttttctactaaccatttaccagggaccaccacttgattgtactatctccatttaatctgtccaacaactctgtgaggagtataattactgtcctcattttataaataaggaaaataaatcacataaaagttaagaagcctccctcacccacacagagctcagagtccagcagtcatctagaatttgaaccaagtctgcttctcatgctcagttggatggaaaggaagtagagcaagtccagtccagcctcacaagtggactgtggtatctaaaggacagatgatatccatgggcttctgcagaactgattctactgattctccatgcatccagctgagaacttcagcttccctcgaaatgttcctgtcacccaggaacccgtgcattacggatggaatctgagtttggcacgcgttcaggttacttttgctttcctgagcctgggagcagagctctctgttatttctaagctcacaaaagtccaggaatgtgtgctttgccacagcaaacaccaaagtgtctaaacaattacaataggtaatagaaagctactagtgaggccaaggcctcacatttcttaattattttctttttttctccacagtatgatatgctgcatgtgctgaataaaagtctgatgaggtggtggagccaagatggccgaataggagctccagtctacagctcccagcgtgagcaacgcagaagatgggtgatttctgcatttccaactgaggtaccgggttcatctcactggggagtgtcggacagtgggtgcaggacagtgggtgcagcacaccgagcatgagccaaagcagggcaaggcatcgcctcgcccgggaagctcaaggggtcagggaattccctttcctagtcaaagaacagggtgacagacggcaactggaaaattgggtcactcccaccctagtactgtgcttttccaacggtcttagcaaatggcacaccaggagattataacccattcctggctcggagggtcctacgcccatgcagcctcgctcattgctagcacagcagtctgagatcaaactggtgaggctgggggaggggcacccgccattgcccaggcttgagtaggtaaacaaaacagccgggaagctcgaactgggtggagcccactgcagctcaaggaggcctgcctgcctctgtagactccacctctgggggcagggcacagccaaacaaaaggcagcagaaacctctgcagacttaaatgtccctgtatgacagctttgaagagagtagtggttctcccagcacacagctggagatctgagaacagacagactgcctcctcaagtgggttcctgacccccgagtagcctaactgggaggcaccccccagtaggggcagactgacacctcacacagctgggtactcctctgagacaaaacttccagaggaacgatcaagcagcaacatttgctgttcaacaatatccgctgttctgcagcctccgctgctgatacccaggcaaacagggtctggagtggacctccagcgaactccaacagacctgcagctgaggttcctgactgttagaaggaaaactaacaaacagaaaggacagccacaccaaaaccccatctgtacgtcaccatcatcaaagaccaaaggtagataaaaccacaaagatggggaaaaaacagagcagaaaaactgaaaattataaaaatcagagcgcctctcctcctccaaaggaacacacctcctcaccagcaacagaacaaagctggatggagaatgactttgacaagttgagagaagaaggcttcagatgatcaaactactctgagctaaaggaggaagttcgaacccatagcaaacaagttaaaaaccttgaaaaaaattagacaaatggctaactggaataactaatgcagataagtccttaaaagacctgatggagctgaaaaccatggcacgagaactatgtgacaaatgcacaagcctcaatagccgattcgatcaactggaagaaaggagatcagtgatggaagatcaaatgaatgaaatgaagcaagaagagaagtttagagaaaaaagaataaaaagaaatgaacgaagcctccaagaaatatggcactatgtgaaaagaccaaatctatgtctgactggtgtacctgaaagtgatggggagaatggaaccaagttggaaaacactctgcaggatattatccaggagcacttccccaatctagcaaggcaggcctacattcacattcaggaaatacagagaatgccacaaagatactcctcgagaagagcaactccaagacacataattgtcagattcaccaaagttgaaatgaaggaaaaaatgttaagggcagccagagagaaaggtcgggttacccacaaggggaagcccatcagactaacagctgatctcttggcagaaactctacaagccagaagagagtgggggccaatattcaacattcttaaagaaaagaattttcaacccagaatttcatatccagccaagctaagcttcataagtgaaggagaaataaaatactttacagacaagcaaatgctgagagattttgtcaccaccaggcctgccctaaaagagctcctgaaggaagcactaaacatggaaaggaacaaccggtaccagccactgcaaaaacatgccaaactgtaaagactactgaggctaggaagaaactgcatcaactaacgagcaaaataaccagctaacatcatgatgacaggatcaaattcacacataacaatattaaccttaaatgtaaatgggctaaatgctccaattaaaagacacagactggcaaattggataaaaagtcaagacccatcagtgtgctctattcagaagacccatttcacgtgcagagacacacataggctcaaaataaagggatggaggaagatcttccaaacaaatggaaaacaaaaggcaggtgttgcaatcctagtcactgataaaacagactttaaatcaacaaagatcaaaagagacaaagaaggccattacataatggtaaagggatcaatgcaacaagaagagctaactatcctaaatatatatgcacccaatacaggagcacccagattcatgaagcaagtccttagagacctacaaagagacttagactcccacacaataataatgggagactttaacaccccaatgtcaacattagacacatcaacgagacagaaagttaacaaggatatccaggaattgaattcagctccgcaccaagcggaccttgtagacatctacagaactctccacccaaaatcaacagaatatacattgttttcagcaccacaccacacctattccaaaactgaccacatagttggaagtaaagctctcctcagaaaatgtaaaacaacagaaattgtaacaaactgtctctcagaccacagtgcaatcaaactagaactcaggattaagaaactcactcaaaactgctcaactacatggaaactgaacaacctgctcctgaatgactactgggtacataacgaaatgaaggcagaaataaagatgttctttgaaaccaatgagaacaaagacacaacataccagaatctctgggacacatttaaagcagtgtgtagagggaaatttatagaactaaatgcccacaagagaaagcaggaaagatcaaaaattgacatcctaacatcacaattaaaagaactagagaagcaagagcaaacacattaaaaaactagcagaaggcaagaaataactaagatcagagcagaactgaaggaaatagagacacaaaaaacccttcaaaaaatcaatgaatccaggagctggtttttttgaaaagatcaacaaaattgatagaacactagcaagactaataaagaagaaaagagagaagaatcaaataggtacaataaaaaataataaaggggatatcaccactgatcccgcagaaatataaactaccatcagagaatactataaacacctctatgcaaataaactagaaaatctagaagaaatggataaattcctcaacacatacaccctcccaagactaaaccaggaagaagttgaatctctgaatagaccaataacaggctctgaaattgagggaataattaatagcttaccaaccaaaaaaagtccaggaccatatggattcacagccgaattctaccagaggtacaaggaggagctggtaccattccttctgaaactactattctgatcaatagaaaaagagggaatcctccctaactcattttatgaggccagcatcatcctgataccaaagcctggcagagatacaacaaaaaaagagaattttagaccaatatccctgatgaacatcgatgcaaaaatcctcaataaaatactggcaaaccgaatccagcagcacatcaaaaagcttatccaccatgatcaagtgggcttcatccctgggatgcaaggctggttcaacatatgcaaatcaataaacgtaatccagcatataaacagaaccaacgacaaaaaccacatgattatctcaatagatgcagaaaaggcctttgacaaaattcaacagcccttcatgctaaaaactctcaataaattaagtattgataggacgtatctctaaataataagagctatctatgataaacccacaaccaatatcatactgaatgggcaaaaactggaagcattccctttgaaaactggcagaagacaggaatgccctctctcaccactcctattcaacatagggttggaagtcctggccagggcaatcaggcaggagaaggaaataaagggtattcaattaggaaaagaggtagtcaaattgtccctgtttgcagatgacatgattgtatatctagaaaaccccatcgtctcagcccaaaatctccttaaactgataggcaacttcagcaaagtctcaggatacaaaatcaatgtgcaaaaatcacaagcattcttatacaccaataacagacaaacagagagccaaatcatgagtgaactcccactcacaattgcttcaaagagaacaaaataactaggaatccaacttacaagggatgtgaaggacctcttcaaggagaactacaaaccactgctcaatgaaataaaagaggatacaaacaaatggaagaacattccatgctcatgggtaggaagaatcaatatcgtgaaaatggccatactgcccaaggtaatttatagattcaatgccatccccatcaagctcaatgactttcttcacagaattggaaaaaactactttaaagttcatatggaaccaaaaaaaagccctcattgccaagtcaatcctaggccaaaagaacaaagctggaggcatcacgctacctgacttcaaactatactgcaaggctacagtaaccaacacagcaaggtactggtaccaaaacagagatatagaccaatggaacagaacagagccctcagaaataataccccacatctacaaccatctgatctttgacaaacctgacaaaaacaagaaatggggaaaggattccgtatttaataaatggtgctgggaaaactggctagccatatgtagaaagctgaaactggatcccttccttacaccttatgcaaaaattaattcaagatggattaaagacttaaatgttagacctaaaaccataaaaaccctagaagaaaacctaggcattaccattcgggacataggcatgggcaaggacttcatgtctaaaacaccaaaagcaatggcaataaaagccaaaattgacaaatgggatctaattaaactaaagagcttctgcacagcaaaagaaactatcatcagagtgagcaggcagcctacagaatgggggaaaatttttgcaatctactcatctgacaaagggctaatatccagaatctacaaagaactcaaacaaatttacaagaaaaaaacaaacaaccccatcaaaaagtgggcgaaggatatgaacagacacttctcaaaagaagacatttatgcagccaacagacacatgaaaaaatgctcatcaccactggccatcagagaaatgcaaatcaaaaccccaatgagataccatctcacaccagttagaatggcgatcattaaaaagtcaggaaacaacaggtgctggagaggatgtggagaaataggaacttttacactgttggtgggactgtaaactagttcaaccattgtggaagacagtgtggtgattcctcagggatctagaactagaaataccatttgacccagccatcccgttactgggtatatacccaaaggattataaatcatgctgctataaagacacatgcacacgtatgtttattgcggtactattcacaatagcaaagacttggaaccaagccaaatgtccaacaatgatagactagattaagaaaatgtggcacatatacaccatggaatactatgcagccatgaaaaatgatgagttcatgtcctttgtagggacatggatgaagctggaaaccatcattctcagcaaactattgcaaggacaaaaaatgaaacaccacatgttctcactcataggtgggaactgaacaatgagaacacatggacacaggaaggggaacatgttgtggggtgggaggagaggggagggatagcattaggagatatacctaatgctgaatgacgagttaatgggtgcagcacaccaagatggcacatgtatacatatgtaacaaacctgcacgttgtgcacatgtaccctaaaacttaaagtataataataatattaataaaaaaagtctgatgaatgaatgaatgaatgaatacaaaacagccccaagtgggtcaattggcctagctccacacaagattgcagattttgcttctagcaccatccaaccaattagcttaaaactgaacttgtatccaggaagaagcaggtggggaatcatgtagttgtttaatggcagttagaagattgagtcaaagcaaatggatctgtagactcatcagatacagaaagactccatacttccccctttccacaggctgcccctaagcagcctcatctagtgccctgtcttgagccacactcccacacagatgaactccaaatctgttctagccccataacttctcttctcagccccagatgcacatgtcagttgcctgctggccatctcctcatgaacggcccacaagtaccacggaccctgtaagaacaagactcaaggcttaagatcacattcccttctccctgccccctcaaccagcatttcctgcatcccctgaattcatgaatggacctctatttctgtaaaacaaagaagaagaacaataacaacaacaaaaaccaacattcacacatatttaacacttattgtagtcaatgcactgtgcactatcttgcaacaattagatttttttttgcacggatgagcaaatcaaagctcagataggtgaagtaacttgccccaggtcacatcattaggaagtaagagttgagattcaaattcagggagtctggctccagagcccaatgtgtagccacgagactatatagaacctcaggcaccatggtggatattccttgtttgcaaccgcacacctatggtcatggccatttccctgcctctctgtgtccggcgctgggtgtcaggaggctgacctctgcaccattccatctgggctctcttgctctttggctgaagattggttgtggccagtgggagattagaaggttggaaggcagacaggtcaggatatttatttccccaaccccaacctgctccctctctgcctcactctcacactagcaggagctgaattctatggtgacaactcctccatggctctgggaacgccatttccctatattactccttcaggcctagggatagtgatagttcccactgttgcttgttcctggatgcttctccatagttatcagttccctgatccctgcttatacctctgtaagtagccctttccttctttttatctgctggatcctgatggattcagactctgaactttagtggcagctaagatgtcttcctcacaacatgccccacatcccagcattatgaaaaccctaattctgtccttggagcagcttcagcattttgttctccctctctatccctcctgctctgccttacactacccccttagcttcccacttggcctccctccatgcaggctcttatatcttcaatatattggccacaacattcagataccccccaccccatccccacaccccctaagctagattcactctttgacttgcctcttcaaaacccttcaatggttccctgaagcccaaagaatataatcaaactctgaagcccacagtagcttttattcatttttgtatttctcccagggcctttgcctgcattcagtaaatgttgtgttgaatgaagaaagcattatcattacttggggagttccgacaaagtgtaaagcacagggaaacaggactgcagtgagaacatcctcaaagattttataatcacaaccagtgttgcagtccccaaatgagcagcttcaaaaacccttcaaagcctcatctatttttgcccttgccccctacttaccagctccactgcctgcgcacacagtagagtttcaggcctctctccttcctaacagggaggcaaggttgtgcatggctggtagcacaggctggtgtcaaactgcccacatccaggtcctgctgtcctgtgtatgtaaataaattactggacctctcaaagtctatacttttccgctgtgccactctgctacactcaaagtctatacttttctctgtaaaataaggacaaaaatagtacttacctcataggattttcgaggggactaaatgtgtgatactaatagattactaagcacagtgttaagaacaaagcaagctctcaaaaacgtgatcaggtgttaccatctaccctattatagggcaggattattatattacacattactatgtctattgtataagctatttgtttttagcagtacttatacatagacttttaaatttaaaccttcccagaatactgagatatatcattagctctactttgcagaagaaaaaaatgacatacagtaagttatgtgtcttgcttgaggtcacaccatcataactgctggagtcaagcctggaatatgggacttctgactcaaaaatatgctattcttctgtgtcctatgtgctatttatgtattattatgtccaattaaaagtcagctcacttttcaaggcctaattcaaatgctccttcctccatgacatcttccttaattccttaggagggatttatcagtttttcttctgcactctggaagcatctcaattatagacctgttcagatgaactgaagtcagtattcagatgaactgaactcagtagtgtattatccttgggaattttcatttctggcttcttcactcaactatgattgctttgaggacataacttctgtcacattcataggtgcaatctcaatgaccatctcagtaccttgcataaagtagacagcaaggcaataaatgtgcagcagaatttatcagtcaggatcaataaaaacataaacagttatgttgcagtaacaaacaatcccaaaattttagtggctttccaaaaaaagaagacctatttctcacttattctatctttaccttgcaagttccatcatctttgttttgggaccctggctgaagagatggacaaagggaagatggtagaaggcacagtagcccttagggcttctgcttggaaataatatacatgcttctatccacatcacatctcattggccaaggtaagacacacgaccctttttgatgtcagggggcagggaaggtaacattcttccagagagggattccgatcgtaaaggaacagaaatcggatcagaaagagcaacagtgaatctggaaactggctccatttacaaggaaaccaacagctagttactgagaaggctgtgatgaatcagaagtatcttacacagtctgacatgcaatcctcattcaaacacacacacatatacacacacacatgcccatgagattacagattagtttcagttgtacaggcaaagaagcaaaggcttaaggaagttaaacaaatatagtaagataacatagaaaaataataggacccagatctgacttgggtctaagtcactccaaactcactttctcctaaattacactgtcctcttagggttttgaggctcctaattagaatacatcagtctttctaccaaaaaaaaaatggagtaaatccttagtacttgacgtgtttcccttgaaacagcagtattggcatcatgggctagacatgcaggttcagacttcaccccagacccactggatcaaaatctgcatttgaacaacaccctcaagtgatttgaaggcatattccaaattgagaagcactgaggtagataccaaaggcagaaaacaaacaaacaaactaacaaaaaaaacaaaaaatgcatttttttcccatcttgacttggaatcagggagcaggagagagccgactgtggtgctacctactgtttgaaaacctcatcaagttaattttgttgaaacaggagaaaacgacataaaacctgttcctagtacccatgtgggagaagcattaacagatgctgccaaaagcccatgaccttaattgtatcttccaacactttgcctaattccctgaatctcatcattcactctacattaattaagacctcaaacatgcattgtattgtgtactgctacgtaccagaacagtgccaagcactggacatgatgagggtctctgtcctagagtggcttactgtctagaagagcgagacagtataaaaatggatacactatgatcagggttcatcaaagagtcaacaatgctctttggggtcctagaagaagaaggcactgtattgaggtatcagggaaggcttcctggaggatatacatgcaggaggaggtcttcaagatgtgaacaggagcttactgtgcaggggctgggaagggacttgtagctttaaggcagcacccagcaggtcagaggccactgaggcagaaaagcaatactgggtatgactggtgctttgggttggtgtgcggagaggtgagaccttttgtggttctgggtgtacatttctagaagatttaagtgttggtgccttatgggatgaggagttcttgttaggaaaaatcaccgggtcagcacctctctaggtgtctcagttttgatcacctgtaggctcagaccctaccttgtttctgagctaatctggaacactgcagggagcagttttagattttttagtgtagcctttaaaagaacattgttttaatctagagcaaatatatacacagacagtccttgaattgccatggttctacttaatattttgactttaggatgggtttatatggacatagcctcattgagttcctcagggaactccttacaacttaggatggggttatggtttctgccgattttgcatgttgctttgtcaccattgtaaagtgaaaaaattgtaagtcaaatcatcctaaatcggggcccatctgctgtgctgaccacattaaatgcattttttacttacaatatttttgacttatgatgggtttaccagggatataaccccatcataaatggagaagcacctatctatacatacatgtaatggttaaacagatggtagtgtgagagtacagagacagaccacctaacccagcttattggggaggtcagggaaggcttgcaggaagatgtgatgactgagatgaattgtaaaagacaggtagggtgcagtgggaacaaaggcccagcatagcaagtgtgggggtgctgcaagctcacatggctggaatatgaagtcagaggtaggagcgagtggttcctgagcatcataagattccaggacttcttctgcttaagtggtggaagctgttctccacctcctaaccctaaccttcccactctgtaccccaatttggctccaaggctggggactcccagcagcaaggacaaaaagaacattactgaccacgtggagcatcaggaaggtgaagaccagaaggggagagcgctgttgaaaatgtgatgctggcagggaccggggtgtggtgagactgctttagaagaacccaggggccaaaggagtgagtcatctgcccaccagcctcttagtcacaagtgataatgtaggtgcccctggatgagaaggcaattaaaatacaattaacctccctgaactgcagttctgagtgcacatcagaaagagatttggagatcattaaatatggggctgtgagtggaggggctataggataagggtggcaggagaaaaacctttctttgaggtcattggctacttttgtggttctctcccacaatcggtccacagtataataacgtaggaaccattgcatgggggaagcagagggacccaaaagaatttcttcctctcttcaatcctccctccccaggcctggccttaagaagagactcagcaactgcaaatcatgttgctgagtaaaaatgtttcttgggatgggaggggatgagaggggaacctactcttgatagctgcctcctaggagcctgttcagtttattaaattagcaggtttctctcttgtggtgagggcactggagaatgaaatgccaaatagatcagtttcatggaattggagactgataaattttcagagctggaaggctccttggagagcatctggttcaaccccccctcgtttttcagatgaagaacctgcagcccagagataggaaatgacttccctaaagtcacggttgctacttgaaactcaaaactaagaggcattgagtgagggaagtgaattctctccataatttatcacttctgcatgtttagtgttctttatattaaatttacttttgataaggagtacctgcaatctcagaggtaatttactgtgaaagataattcttaagatttgccatcattattaacattgacttgaattatgttgtattttatatcagaacgtaggtttaatttagcccatggaaaacaattctctcagttataaaaaaaaacttacttccacaaagagaaggagcttagcttctcaccaagataatactaacgtaagttgcaattccttgcctacatctgccttttcaatcagatgttcacacctgtccttaaaatcttcgttagcgtccattgttaggttgggcaccttgggacagataatcagccctcactccagtgcagatgcaaagaggcgggagagttagctaggctgaacctgagttaatgaacatcaagtgccaggtgctgggctagaccctgaggatgcaaaagtcagaaccattaggaacaattcttctggagctcaccacctcatgaggactgggctagcttagtgagaatcagaaaaggcagatgaagaagcgttatgttccaagataagcatgtcctccttctagcatttgtatagatctaggcttagtccagggtgaggccatgttccatgaccccagcatggagctccatttctctctctaaaggtgcactgttcaatatggtagccactagccacaagtcgttatttaaatttactttcattaatttaaaaaagtaaaaattccattccttagttatgttagctaatttcaggggctcaatggccacctgtggctagtggctaccttactggacagtgcagggttaatccttgctgccacttagacaattctattggacagctctctatttgctgaccccagaatttggtctgtcatgcattataacaccaactggctcccatgttgactgtattttctccaagtgagactggggtaaacacccatcctgcatgggtcatttgcatttcctcaaaagcctttgcatgtcttctattgcagctgcattctacccaataatagtggaaaccaacattcatcacgtgtttgccttatgccaccatgattctaagtgctttcaacacaatcctccttttgatcctcaagaaaccctgtgcacacaaagaggaggtggcagaggcccagtgaaggacttgtccaccttcaccagccatggatagggacccaggagttggatctgggcatgctgcttcagagtccaggtctgaaccaccgtccattctatgtagagttgggcctagtcctggccctaccctttgctggatgttgcctttaggaaagacacaaacacttcaattctcactaagccctcttctccaatgggagaagctgctttcactctctgcaggggctttgtgaggctcagggacagggagagtgctttttgaattttaaagccctgagtgttaggggccattatgaaaaacaaaaatactgcaaatactgtccttcagatcagcactctgcaggctggagaatcacctggagagcttggtaagcagcagacactctgatccaccccaagcagactgtgtgagtccagagccaggcatcttcaggtatagcaagtgcctcgggtggtctgagacaggaatccttgagcccttctttgaagaatgctgattataagtttccggctttggtgcctgatgtagaggagtgggtggctggttctctcttcagattcctccaggatctcaattttcaaaggcaggtgcccactccaccctgtgcacatctgaacagggaattagtcccagtggggaacatgatatatcacccggcattccagaagtggaggctaccctgtgttccttaccacccaagtcttagtgtgaactcacttgaaagaaacagaagactatctgaagaacacatagtccttccaattttgtgagagattctccatctctttcaggccagatcattcaaaagaagcaagcttagatagcatggtctgtctgcttgtagaaaggcttttactaaattatacttgggcatgaggtcatcggcctactataagaaaagatgctataatgaacctgtcttctgaatatactgaagggatgctgtggaggatactacatcataacattttctccttggcaggatcaacactcaggtttcaggcccagaaaaaaactaacttttctttgagcagtcactttaggttaatcccatagacactgaggtttgagagttaacacatttcatttttccctcttgttttggctgttaggaagcccagagccaaatttactacccacctctaacaagatgttaaggcatatgatgtgcaaacactaatcctactgctggcttcgtgtttttaaagtttatttatttattttagtgagctatgaagacaactaaacatttaaaggggaggggtgagagtagggggcttgcagtacacatcccacagcaaacaaattacaacttctttcttaggcacttctctacacccacatccctccctggagctatttgggtggtggtttcatttttctgctctattttttctttacttggcatctttgtctaccattttcccttctgacattgtgtgcaattttgtaatctgctttgtttattttaatgagccatgcagtttatgaatctttgcctagaatagttattaattgtccagtaggtgtctggaattgttctaggtgccaggactacaacagtgaataaactcggcaaggttcttgttgtaacagagttatgtttgtactcatttgagaaatagacaatgaacaagaaagagaataaataaataatgtaatttcacagaatggtgagatctgtaaaggaaacagaaaatatgatagcaagggatggggaaggagaaatattaggtaaggcgggaagaaaggcctctctgggagagggagtttgaactgagatctgagtgagaaggagacagacacttagaggtctggggaataaggatcccagacagagtagatagcaagtgcaaaggccctgatgcagagacagcatgctgtgttggaagaatatttacgcccacctggcaacctcctcatcagctttcaaacccttctcacctctatctactttctccttgaaataatcccatcactctacattactcaaatagaagggcaaccacttcgtgccttccatatctgtataatccacactgaattgtacctggcaactgaccagcatgccttcctcactggactgtaggcacatggggcatccttgagaataagaatagcattttccttctctccaacacagttcctggcacacagaaatcacatagttttatttctcaaaataagccatagctaaagttacaatgcaggcagtgctcacactggagtactacctacatgttttgggctaaggtacagtttttccatttgcagagccccgagctgcctgtgctccgctggtgacctgaatagattagcagcagcgaaccaagggagcatagccagctcccgtttgggaggagggagctggctccctccttgctccaaagagccccttttgggaaaggaatgactcttaaggcagtattggatttccctgcaagatttatgacccaatttaaagttatggggcttttattaattataataaacaccaatttcattacacttcaacttccaaagaaattacatactatggaagggaaataaaatgttagttttgtgctaatgccaggcacacattaactggctgggtacccaggagaccaagttcctgttggctgctcagctggtgcagaggaaggggcattttggaagggagagcctgagggagctgtttccaggatttaaatccatttggtcaaaaacaaagtaaattaactgtgctgccacatggtgcttgcaggaccacttcctttatgaggagctgtaatgagtaacacactttgggccctgagcctggagttctagacctgtctctggcttgctgtgtgatctcagatgagttacttcccctctctgtgtcttgattttctcatcttaaaaataaagacttaacgtaggtcaggtatggcaaatagatttaatatcttatgcaaattccaatttataggaggtagtcacctacaaggctattttgagaaggtttctgaagtttcgtccaggattcctgggaaagagcaatatgatcaattagcagtatcagctggggacacaaattaggaggatggaggtcatggtctgggtattcactatcccaggacttgatggtctcaaaggtccattctggatttgtggtttaatttaaggctgtgttcttgggatcctggaaacttagtccataatccttatttataaaatagatgtagtggatcataagtcacatggtgttgtacagattcaatgatgctacatatggcatgtgctttgcaacagaagacactcaacaaatattcctattcttcagcatttccatcctaccctcataaaaccatgctaattggtgaccctctccatttgttgagggttttggagaacttcctcttccaaagcctcacctcagtcaaagtcagatacatgggctttttcagctacttgccccttgagcatcatctgaagccccacagattccaaaagaagaattttgtttttaaagctgattggctctatattttattgttatggacttcccaactctgtgctacttttatttttgctggggaatggaaaatattttgtcacttctaggatgatagggcttgatgaacccccttagggggtggagaagaggattcagcaactttgcacaattgcttcctgccagatgtgaaattaagcttctgggtgcaaacccagagtacatttggataatggatgggaaagcctgctgggcttatggggaggaagaagagaagaggggaaggacagaatgagagaagctctgcgtgcgtgcgtgcgtgcgtgcgtgtgtgtgtgtgtgtgtgtgtgtgtgtgtgtgttcatgtgctctctgggcctcatgatgttccagtattacatatttccaagcagagaacagatatcagcagagcgagttgttctctcctgggtgccctcacctcttccctgatgccaccactatgagagtcatatcgttgtccctgagtggttgagagcccacattttgccgttattcagacctgggtttgaatttcagcctcaatactcacactagctatgtgcacttgagcaatctttgatgggcctcagtatcctcacctgcaaaatgagattaataaatagtggggtggataatccattggtgttttgcaagtgaacgtgtgagagaagtgctatgttcaagacaccttattgatgtgttttcagcttagccttaagttactgcatgaaagagacaggacattgactcttgctgtgccttggtctccccagcagtctacaaaggaatgagacaggatgaaatcccaggcccttctagttttgaccattggcataaatgataaacattgtctgcactcctggagtacagggaggatgcaccccatgcatcctgaatgcatgaactactctgatgaatactttctgctgcccaccctgcaattagagcccatattgggaaatttcagactttgacgttgcgctgctgggttgtacattcaagttctgcctttacttaaatatgtggctatgaacaagtcacctatgctgtccagtcctcctttggatccagtctttttgaataaatgggggttagtggcaagcattgaagttttttttgctatttttttttttttttagatggagtctaactctgttgcccaggctggggtgcagaggcacaatcttggcttactgcaacctctgcctcctgggttcaagcaatcctcgtgtctcagcctcctgagtagctgggattacagacatgcaccaccacacccagctaatttttgtgtttttagtagagacggggtttcaccatattggtcaggttggtctcgaactcctgacctcaaatgatctgcccacctcagcctcccaaggccaccacacccggcctgaatattttcttccatgtcatgtgtttagcaccttgcctggctggttataaatagtgaagcagcatggcctgccattctgggcttgtagtgcccggactgagacctccatgcatgctagactgtccttctcttaagaaacaataaagccaattttgcctcttaaggggttgcctagtttacttggagccaacagacaaatagctttttaaaatccttcataattcaagcgtggttgatacctggatgtcttcccaggctgagttgatcctggtagggaatcttctctgattatcctctaccatgctgtgatttggtatctgtcccacaagtcctgaaacattgagattctctttaaatcatgtcttacgaggcagaacagttgtaaggcaagaacatggactctaggtcccataaaaccagaattcaaatcctgaattcaccacttacggggtgcataactttgcagcaaatacacttaacttatttgagtctcagttccttcatctgtaaaatggagacaacagcagctgccctgtcagggtaattatgacgattaaatgagattaaaaaaaaatgtaaagcactttttcagtaggcactcagtagaaacaatgttttccaatgtgaattgttactctgtttatattgttatccaatcaacctttaattacctctaggcaaagatatgttaataatttatttatatttcttttctttttgcctcagagcctggtagaggacaaatgaatgcatgagcaagagctctgcttagcctgacttcaggccaaggatgtgtcttttcttcttggttagaatgttccttccccaaggatggcatcttgcaagacagtgcagaaatgcaataacttctagaatattcctttctcatcgccggctttatgtttcccactggttcaacctgctccatcagatgtttttttggggggaatcttcccttcctggcagcccaagtaagttctgattttgcatatgcagagagtctagcgactccgcaacagccagggtatgaatattcattgtcagtcctcagctgtgcaatggacaaagaaatgctgatggaggaggatgggcagggtctgttcgcttggcctgcaggggctcagagctcctcaaggatgcattagcccaatggcctggctcctatcgggggctgtctgtagctttgtaagttctggcagtcaccccttgacttcaacagtgactccaacctcaccatgacagagtcttggccctttgggcatctcactaatctgaatcctctcagaacctgtgtgtagcatttatgataggcgaaacagtttaccccatagattacaattcacactgtctcctgtgtcccagggtcccatgtccccagcttagaaggcaaaatttacattgtattttgtgtgtatggttccccccagggttgcacaacatggtggccctggccccatccattgctcatcactctgctttctacaaaagccagacatcctggccgaaaaatgaaccagacaggataaaggagaagctagttggtcctattgatttacagtcttgagatgggtgggggcttcaagattataaagttttactaaagctccccaaaagatgtccatgggtaggcacattgggaaataggggttataccatgataaagggatattatcaccaaatgggctatatgtgtgtgtggtcagtaggaagactttgaaaaggagggattttggagaaatatgagcttctattccaagtattgtgtgtcaaaatgagactcactcagagaccacttccttcttccaacttcaatgatattctgcacagcatctatcaaatgtcctcttgttgctcctaaagaaataatggttttgccccaaagcctctctctccttccctctgcatttcacattaaactttgtattatggcatcccaccccattgcactttgcactgttcaaggacaaagaccatctcttaatcatctttgtgcacccataacatagcacagcatctgctatatggtggtatacaacaaatggtttagaatgaaatgaaatatatctttatccagatttctgtaattggttcatattgactttagctagaaatcaagtttgaagcaacttacaatatgcaaaagccatggcggcacagtggtaaaactgcacttgcagcaaatgtacccatgtgcttcatttcaaaatagttaatatccctggaaggctacatactattcccaacaatattacctttgctcggatgtatctgaaattctagtttcctagctgttgtcttcatagctgcagggatcaggtggagcctatgggagaggggagcccaccagtggctggaaactctgggaaaggggcctgttgtgtgaatgattattgcaactgtgaaaacaagtctaagagtgaggataaaaagttggaagtggatttacaccagagatgccatggcagaaatcgaagatggatgatgaatataggttattgggacagttatggtaatgggaactagttatcctcaaactgaaggagtcagtgccagcaatatgtcctgggtgaatgagatgaaaatatatttcccttgcaactataaaagttgcaattggacatgcaacaggattccaagcaagacaatatttaatctcattttatccccaggggaggtgctctgcccatatttctttctttcttatttttactttttatttggaataattttagacttacagagaaactacaaaaactgcccagagttcatgtataatctttttttttttttttttttttttttttttttttgagactgagtctcgctctgtcacccaggctggagtgcagtggcgggatcttggctcactgcaacctccgcctcccagattcaagctattctcctgcctcaacttcctgggtagctgggactacaggcggatgccactgcacccagctaatttttctgtatttttagtagagacggggtttcaccatgttagccaggatggtcttgatctcctgatcttgtgatctgcctgcctcagcctcccaaagtgctgggattacaggcatgagccaccacccctgacctcatgtatactcttacctagcttcccgtagtacaataatcaaaaccgggaaattaacagtggtataacattattaactaaactattgatctcattagaattttatttatttttccactagtgtccttttcctgcttcaaaatccaatccaagatgccacgtggcattttgtcagcatatctttttattgtcttccaatatgtgaccactttgcattctttcgttgtctttcatgatcttggcaattttgatgagtattggtcaattattttatagactgtctcttgattttgccccaattctaaatgaagaaaatacataggcttggcaggttacagggtgcacaagaatattaactttccatttttccatacttacttccaaagtaagtcacatgttactctgattaactcaacttaccccttcctccaatggctgttgcccgcttgccaaattcatattaattcctccgaggtaaagatcctcaagtttg[144 bp omitted]tgtaaaaaagttttcagcagaggcagctccatttaaggaagtatttcacctctccacaccctagcttagccacatgacagggcgatgctgctgccagggccagctgtcagcaccgagatgggggtagtgaagctgaaccgtggggtggacccctggagtaagcctcaggaggatgtgagtaccatgctaacttagtttcttccaatctgtggccacttctctctatttcttgtctttcacgatcttgacaattttgatgagtattggtcaattggggcaataccgccagagggtggccagggtctgaaacaggcaaagcagaagagaggcactatacctgagcaacggatgaatgagggtcaaagcctacaggaggaagccagaggaggtagacaggacaaggctggagagagagattggacgtgtgattatgtggactacctctgataaagaggtctaagtcccttctctataagagggccttggagacccggtatgagatacacaaagggaccattttacttaaatttcaaatactgaaacttgtgttcaaaatttaatcatagcaatattccataacatgctagatagatgtcttcatgttttgtagataaggttgtatcttccttcttccttaccaccagcacttaacttatttcatataagagtgcaggttataagatttaaagttccagaatagtctacatgaatagagatctgtggagctgtgaagtgcacaacctctgcaattgtacaaagcagccctgataggtgattgaatgagtaaatggtacaatatcttatgggaagtgagtatcctgtgcttacttctgggaccctaattacttccttgtaacatgagcaatgctatccctttctccatggtgatcacacatttcaaaaagttaacctaagtgacacatggtaaccgcacatagtagacactaagcaaaattagttccttccttttcctcatcaattccgtcacatattaataagtatcatatgcattctttaagcatgggagaggcatgtagctgatgtgtgttcaccagccagtttaatctggagagaagggcagagttcaccatcttcatcccctagatggagtctcctgggatataccagtgagggaaagttattagtggttttgccttcttgttctggatattattccatagggtctctgctgagacacccaggccccagtggagcacgtaattgtaagactctagatctagcaaacaccccatctgcatgccctcccaacactgagaatctgtacatactcattaaaataaatgccctactgtggattatttattactgccagggtgggagtaaaaatctaattactagttgtattattttgactcatgagaagtaaaaaaaaattttttaatctctattagattattcatcagcctagtgataagtacttaacctcacaactcaatgcttagtctattttaatacaattttcttaccaaagtgcaataaagactcactaatagacagttttatacatactcattgaggtgtaaacagaccataagatgttgaagaagttggaggtgggagggtatctagggaagagggtgggggctgcccattcaactgtcatatgagctgtgctgtgagccacagtggacttccatgcaggaggatgcaaatttccacctgcaaacaggatgcatgatgaatatgcctttaaccagccttggctaaagacagcagggtgtattaaaaagcaagttggagagatggggagacaggttcacagcttccaggctcctggtccttggctatggctcttttgatttaggtgcttcttttgtgcattaggctcaaacaaactcagaacaaatctagccacgtgtaatatcctttgcaggtgtcctactatgacaaagtcctcccttttgtgcttctgacctgtctgcccttttcctcctctccttggctctcagattccttgcattctatcctgtgcatgtctttgggcgtctctttctcaccattcactcctgcctctggctcatccatgcctcttgcatattatcactccctcctaacttctgggattgtagtagcagcagtggccacagcaggttctggaagagaaatactcccttcagcagccttatcatcagtggccagtttttccagtttatcctgggtcctacagagatagagcatctagactgtcacctggttcttccccaaagtctaaggtgagcggggctcaggttaggtgaattctcccatatgggactgattttcttcttccattcctcccttattcctcccttattcctctttttcattctggagcacctaccatatgcctggaagccagctcagtactagggggtaaaaagatcgataagacacagttcctgcaaagccacatttcagctgggaaagcaggttttaaaatgaagagttagcaaaccatatgataagctttatgaaatgaggggtctgaacaagttcatccccagaatctccttaagttccagaattctaaaggtgtagaattctgatggcatagaaaatcttgtgatcttggtaaatagaggtgtagtgatattgatctggtttccaggactttccaaaattgtcttggaagctttgttctgatcagtgccactgcaattccaatcagtagtataatgtttgccttatggttctatgtttcatcaatcatttaatgacaatgatattgcgactatgctcgatcactccattgacaggtatggtagattttctcacttggcaaccattcagatttcctttttattacgtcttctaacacagcagacactagaaaagctagaaatgacatgtcccagactctcttgtacctagacatctggctgtgagcaaggttctctctatcaatgcgcttgtatgagacctaaattagaatctgagttctcaggggaaaaggcaggagaggtgagatcctgggagaggtaaggaggatctcctgcagcaggagatgtgactcaggattgagaattgttactgaaagcttatcttattccttcagccctaccaattattttgtaagctacctaaaacctagtaataaatccctttcccttgaactacccagagttgtttctattaagtgcaactaagccttaaccaacagagcacctagaaggaaaataaattcagcataacagcacaaaatcccagtttacactaaaatagagtacatttaaaagtacacatcttcccatttagctaatgcaagaggctcttaattttgaggtcacctctgttttaaagtagatatcaaaattcccaagaagtatgtccacttcagcactgtggtggacagcgatgacacatctttgtccttgtggctctgcagccagccggtatggctgggcccagacatgagcattccatgccggccgggctggggcaggttccaggattgcccagcctcagtctagggagttaacggggactccaacagtcaatgcaagacagtcaacatctgggttttctatctatgggtatcagatttccaaccactgatccagagtccactaggaacccatgattttttagggtggaacccctaattctcgaagacccaattcttcaagaagagtaagattagaaattcagccagaactgttaaggtcctgccatttccccaaaaccatcaatttctaggaaatcaatgtcaaacccatctgaagaaacaaacatcacagcaagcattctgtcactttctgcatggaatgtttgtccctgcttgcattcccccttagtccaggaatcttttctatttcaaaaataataaatgtgaagagaggaaatcctcaacaaagcagtatccattccattggcctgtctcccgagacctttgactttgcaagaatattttagtttcaacctttctcctcagcaccataaacactgcagtgacaatttattcctttccagcagccataaaaatcatctcccttatttctcaaaaccatggcaaattagcacctttgaccttctttttctcaggccctgtctttctctctcatggtgcagacacatgaacaatttatgatgttccatggagggttctcctttcttgaatgctgatagaaaattccagccagcaatctccatactaatctgtccctctgcttatctcaagcctgtagaaataaatccaaagtaacattttccaaaatgtgttttatagctcaccaggcctatgaaatgttattaggtgtcccacaaataaagtattttgtagtcaagtaagtttggaaaacactgcatgctttctttagagttcagaatacatatttgcatattaaaggctctgacaaatcctaaagaaatgtattcaaatttcaaatttatttagcccagaatctcccagtttatttaaacatggagggttttttgtttgcttcctagctattaaaattctgtgcaacagtgttctgtgggtgcaagtttgagtagatgatgacatttgaaaatagaaagttgaattaaacaaccaggggtttggacatgagatgagattccaatttctataacaactgctgctgatgggtgagactcatagccaaggggcttaatacagagtcaggctgagtagcttcctcttgcccaaggttatttctgaaaaggagtataggactaaatcagcagatggggcttaaagaattatagctgggccaggcacggtggctcatgcctgtaatccgagcactttgggaggccaaggcttgtggatcacctgaggttgggagtttgagaccagcctgaccaacatggagaaaccccgtctctactaaaaatacaaaattagctgggtgtggtggtgcatggctgtaattccagctactcgggaggctgaggcaggagaattgcttgaaccctggaggcggaggttgcagtgaaccgagatcgcgccattgtactccagcctgggcaacaagagtgaaactccgtctcaaaaaaaaaaaaaaaaaaaaaaaagaattatagctatgatgatgagaaaagatggagagccttgctactcaagtgtgatcccaggcaagcagcatcagcatcttttgggagcttattaggaatgcagagtctgaggcctcatcccagacccatggaatcaggagctacaatgtaacaagatccctacatggtttgtgtacacattaacatttgagtagcaccggtgttaagctgtggttctccatactgcctataacttagaattacctggggaactttaaaaatataggtatctgagatctgtccccagggattgcaattcaaatgttctgaggcagagctatagagtttgtacttttaaaaactccctgtcatgcaactaaggtcgagaaccactggtctaacccagacgaatgccatggataatgaggatttaggagtctcaggagacatgataagaaccaccactttgagcctttccacagataagtgctgcctttggaacctggttcactatgataagttagaaccacctgaagagcatccatggccttttagaaggacccctcatagatgttatcagatgcaaaagctacaccacccttttaggctcagttacttctgtaacttcttccttaaagttgatttaggagttgtaccattctatcttctccgggtctcagtatgttgtcagaaccacactcttcttgcgagcaggcttgtatgccaaccagaaggctaacagccttaattacagaatgtcctttccctaggagttggtcaaagtcatcttgacatcctcagttgggtggagaatcttgggttatgtagaaaatctcagagaggggaatcgcctcaaatgtgcacaggcttggtattccatcattggtcacaaatgtttcttatggaataaaaatacctaaatgtattaagtagttcctgcagtagacaatttgcttgagctacctagtttaaggcttttttttttttttttttttttttccacttagcgttcttgccttaggaaagtaaaccaagcctcctggaaagtaattattttcctgactattaagtggcagaactggaattagaattcataccagcatggctctaaagctcctgcttttctgactgcactactgaccagagcattgagacacacagaccggctctagttcagacccaggacagacatgactgatcccacatctcactggaaattatgatttcagacaactggaaaattctcattcatcagaggatagagctacccatcaagccatgtaatgtcttcccttgcatcatagcttgtcctctgctgctggcttcagaggcatgtgctgacatagataaggagtgctcagtgcctgtgctctaaaagagtgatgtgcgaggacagataatatgcaaagtagggatgctagggagagtaaaatgctaatatggggtttgaacctgtagatagagaattcagtcaaccacctattatctgcagttgtaaacaggagagaggtagttgtcactggtatgtcctgaagccgttcctcaccctgctggggcagggaaatgtgatagtctgacatcagacaaatgagagaatgaccagggacaggtctgtgagggtggtcgcaggcaggctgaagttctttttttgtttgtttttttgcatcaggttcttggttcttgctctgttgcccaggctggagtgcggtggcataatctcgcctcactgcaacctctgcttcctgggctcaagtgatcctcctacctcagccttctgagtagttgggactataggcacaagccactatgcctggctgcccagctaatattttaattttaattaaattttttttttttttttttgtagagacaagttctcattacattgtccaggctggttttgaactcctgggcctccaaaagtgctgggattacaagcgtgagccatcgcacctggccttgatgttcttaaaagaggctgttgcttgacaggcatctgctcccttattacgtgtctggttggcttttgtaaccaggagacctatggtcttctccgggtctcagtatgttgtcagaatgacacccttcttgcaagcaggcttgtatgccaaccagaaggctaacagccttaattacagaatgtccttcccctaggagtaggtcaaagtcatcttgacatcctcagctgggtggaaaatcttgggttatgtagaaaatctcctaaaaagttcccccagcaaaccttgggcctatcttcaatgctgagtaagtattccactcctaacattttgggcagctgagagaagatgcatgatggaaatgcaccagttctgaggctcaacatgtgtccttcacttatgagaaaccaggtggtacattaagaggttcaaggtggaatcacaagagccctcccttcactgcttattgtacaaacacctgcgagtatattcatgctgttaacaaaacgatacatcaccaatctctcttgagactactggtttcattcaccctctcctataaggctgttggaatgcaagtatcttataggactctctacatttctctaggtctttgcatcattttggtgaaaaaggatctgacatcagttctgtggctttggcatcaagacctactgggatcttaacgaggaggctgagctgttggcactgagcaaagtcatggatagactgacttctctggctacaagtcttgaattctaattactctggtccatgggacatgcctaagctgggacatcactggctttactgatgctcatggctgtttgatttcttgggcagggtctcctttcaatcagctgaaagatgctcttttgggttttaggttctatctaggatgtaatcagctcttaacaagggttgggtatagagagctcaggtaaatccttgggagagggggctggctaagtagaagcagggagtcaggatctcaacccaataggccaggcatcagggcagtgggaatggaagagaaaccaagaacccttgaagcggaggtcctgttttatgcccttgtcccataaagacaggtgaggtgaggactactgctcagtatgcactgggatcctgggggtcaggcgataagacaactccagcatccttcccctgatgggagtgggatgtcttaagctctggttttcttcaacacagacatcctgaaagattggaccctgcagctaagaagcattggagaaggcaaatgctggcagtctcaccttgcaattgccatcaatggtgctccatttccatgcacctcccatttgactatctctgcttgcttctcaatggtctctgaaaatgatctctctttgtcatctagttttgcttcccatgtgacccattactcattctccctttggtctcacttgtccctcctctctaccatgagcccaccaggctcatctcagctctgctcttagttgtaattcctattgtttgtttttctggaattcttttctttcttccggatgcctccccaagttgtacatcttgaaggcaacgtggagatctgtcttttccttaaatcctctgccaactcctgccgttgactgaccacttcattgtaaccctgaatgcttgtagcgctttcacaatatgctctaaaattgagagtttaattctgtactgtctttaattgtaggctcttatttaatgtcatccttctcattctgctcaattcaacaagcatttatgaatattgataatgggccacagtgggacagcacattaagttggagacagttcttgcaaacataaaaatagcacctactcagtgcagggcagtttttttccctcacactgaatttcaagcttctttcacagtacataacactagcattcactgagcacttggttctcacagactgtacggagaaatttcccattatcttatttcctccttacagtgtcccagtgtgcacagcagctttccatcattctctgccctggaaccccctttgagaaattctgtgcccgctgtattcttagagacacggaccccatggtcacgttgagtgggcagtaggccacatggtatggtccattagttgtggccccctactctgatgctgaccaaagctggaacaaccagtttctttttcttcagtatttgtaatttggactaaaaaattccaatgtctgttggatgacaatattgagccaggggtcaaggacaccatattggactatctattttctgctgtgtacatagagaagcagacaggggagggagatgatgaatcagcaaacatggagaaaagcagagggaaacggagaaggagagacagatggtgagaaagataaaaagatggggagatcaagaaagcataactaactccattgataacagcgtctcagttcctgattccagcccttgtgagagctggcagtacttcctgcccttgaaacacatatcactacatctttccaacagtttctggcttaatgaagtcagcttacctgagttactattaccacccaccacatacacctggttatgacacactgtgagaaacattacctttccatttcacagattaaataactgatccttggtgagttccactatcttttagtcaaagattggaactagaaattgaaagcagacctttggattctaatatactgccctatgcttaaaacctaacccagagctaaacctctagtaggtcttcaattaatacttattaatccctggtgaactggtccaggtcattctagccttaatcccctattccttcctttcttctccctactgcttacctgatgtcccctgactgttttcttagtcatttccttggctcaggatcagccttcagccaagaaaagagcacagccatcagctgttgaatggtggccctgaagattatgtcaccattttgacactgccatttggggctgcctgtggtcttgtatcatcaactatcttccatgataattgggaggggcagttgaaggcagaggcatctccatacctcagaaaaccttaatcaagagaacagcagtggtgcctgcgctcttggcagtttattacaattcctgtaacaagaggagctgtggggatgtaaggcattatcctctcccgttgtttctaacaaaatagcccagaacagcaggcctacaaggacaaggtgaggccattctccattccaaacaacatatacttttttgaaaataaaagaagcaatttaagcattttggcttcctggggtgagttggcaggcacacttctcatctcagggatgccttcgggtgaaggtgttttaataagagagaaagcgggaagaagatagcagaactctccagaggcagagtggaaccacggagcatgggctatggagcccataggctggggggaggcaagagaggggagacaggagagggcttgagggggatgcacgtggtgggagatgccttgttctgcctaggtacatgtgccctggagtccgaagctcctgggagagccccattaaccacaactcagaggtgaagaatttaattctatttattttgcttcttcatttatccacagcaaataagagaatgttgaaatgatcattatataatttgggggtgagaagatatttcctcaattacatcttttgagagcctataccctaataaggacatgaaccaaaagaggctgcgtttctttgaaatgatggatatgtttctctcatcccctgaagagaaaatgtgaggtagtggctctggggcctggctgcttgggattgaacaccagttcctctgtttgctaatggtgtgaccctgagcaagttattcaatttctgcagacctcagtctcttcaccactaaaataggagtaataatagcaccaccctcgttgaattgttatgagtgttaaatgagtgaatacccgtgcagtgctaagagtggtgcttggcatgtagcaagagcccaggaaatgttggctattaatattcaaacagcttttggggatatcgctacatattctgtgcctaagatgcaaagatgaataaggggatatctgtcctcagagcatccatattccggttggatgacagacattagaaaataacaatatatcaaatttattgagcactcactgtgtggcagacagtgtgtctggagcttaatgagagagatgctattacttatctcaggctcagagaggttaaacaactggcctaatgtcacacagctaagcagcagcatagccagggagcaaacccaagcctgcctgataccaccatctgatgtctcaattgctgatttttagcatggatactacttcctcagagaggatttgcattattcttccatcgagatgatggaaacatctcatccccaggttggctcttcttcctcatcccattctgttttccttcatagaatttgtcacaattttaattgcatttttatgggtcatcttttcccccagactataaacttcatgagggcagggggcagatctggtgcattcatcactgcctgtctagtgactagcacatggcctgacacagagcaggcactcaataaacactactggaatgaccacctatcatggactgcctctctggagggaagtaggaagttacagtgtcctctgaaatgctaaaataacatgaaggaaacacatggggttacctcagggtgttggggaaggcagttctgaggaggtgatgtttgaagtagatctagaaggatgggggagcttgtccagtggagagggagtggaggctatttcaaccgtgtgcagaaacatgtccccaggaaaagccaaagggagttgagaaaacagaggaagcccagcctagcgaagggcaagtgtcagaaatgtcttggcttcctcggttacagctccagtaaaaccacagaggcccccatttaggctgggcccagagcgagcgcctattgggaataaggttattcccacatggggctgagtcttcacactgcaaaaagccctttgaagatccctttgagggagactgaaagaatgatgttttttctttatcatccacagagaaagaagataacagtttgactagggacctctgtgtaatctacaaatgagcgtatcagttagaattcagttggttgaaagaagtagaaaaccccacactcatgggagttgaaacaggatggacacctggctccatcatgtccaagctcaggatgggcagtcctgggccatggtagctcagtcccatcaagtctttggggaccaggcagcttccagctttctgctgccccatgctgaggtattctcatcgtccagaatgaactctgactgttaccccagtgttccaagaatcagactgaagtaggcaggggaagaaacagcttttggagccctctgcttatacttcattggccagacctaggtatacgaccatacctgtctacaaaaagaggctgaggaatgtgatcttcatataggagactgtgtacccagctaacacccatagaccttaaaagaacttggaacatatattgggatagaccacagcagacccaggagtttgcaaatttctgtttgcccttggtgtgtgcaatgaaatcattacctggaccagagcttaatgtattctcaagctagctaacattcatacttatggattgaatactacgccatgtcaatcatttcgcattttaaaagcagtggatcggctgggcacggtggttcacaggccgggtgtggtagctcacacctgtaatcccagcagtttgggaggccgaggtgggcagatcacctgaggtcgggagttcgagaccagcctgaccaatgtgaagaaaccccgtgtctactaaaaatacaaaattagtggggcgtggtggtgtatgcctgtaatctcagctacttgggaggctgaagcaggagaactgcttgaacccaggaggcagaggttgcagtgagctgaaatcacgccattgcactccagcctgggtaacagagtgagactccgtcaaaaaaaaaaaaaaaaaaaaaaaagctgtgaatcactatgtcctaataaactaataaactttataggtgattctggcaggatgtggtggctcacgcctgtaatcccggcgcattgtaggctgaggcatgtggatcacctgaggtcaggagttcgagaccagcctggccaacatccaaaaacccgtctctgttaaaaaatacaaaagttagctgggcatggtggcgcacacctgtagtcccagctacaggcaggagaactgcttgaacccaggaggcagagattgcagtgagctgagatggcgccactgcactccagcctgggtgacagaggaccctccatctcaaaacaaacaaacaaacaaacaaaaataaaaaaataaaaatagtaaatctttataggcaattctgagcaccccctaccatcttttccccttgacagcagttcttccccagcatccctggggagtcctgtgtgaaacctctgacttaagggaattgtcaagtatttctgcccagaaaaactag[132 bp omitted]catggagaaaccccgtctctactaaaaatgcaaaattagcggggcgtggtggtgcatgcctataatcccagctacactggaggctgaggcaggagaatcgcttgaacccaggaggcagaggttgcagtgagccaagatttgccattgcactccagcctgggcaacaagagcgaaactctgtctcaaaaaatgataataataataaattaaataaataaataaataaaaattaaattctaattgctctacctttttgagcagcacttccagcttatcatttttgtaataaatccccctcccccccgccaatttctgccagttctcacagatctctgagcttctttatttgggcttacaaggagccgggactatttggtaccttaagggtttagaggaatgaaatgacataaagtgtgtaaagagcttagcacagcacttgatgtgtaatacattttcaataaatgttagctattattattttctcagaatttgttctgcttaggtaaaatgcaactgtaaacattttttttttaagcaaaatggcctaatagtgaaattgttgtgtctatcccatggcaatccctaagttacgactaataaaatacaatttattttttagttaaattcttcaccaagggacttttcttgattcttatctcctgttattctgtttattatggcatcaaaagttgcaaagacctcccctttagcccatgccaattcttctgaatcattttctatgataaactgaattccaggacttcactaccattagcttgatctactgaattatatctctaaaatgaatctgaaacatcagctccttcttccttaattattcgatataattcacaaataaggtacctggagattcctcttcatatttatcataaagagtacacttagtcttattctgcatatataagatattcttgctgccaataatataaataaaatgataagtgtatgtcagatacccaataaatggtaaccatcactgtcatgttgtaattgttgacgatacttttcgtatttattgagcacctacaatgtgccactcgactaagtgtttaatacacacaatctcattttaattttcccaacagtgctgtgagatagatgccattaattctattttataaatcaggaaactaaaactcggagactatgtctgggttgtccagaaaatagagctcagagccaagcttacttactaaactttatcgcagggcgagaccataatcccagggaatcataaataagggaaagggggcgtagagtagagtaggaagagaagcagtttcaaggtgatgcacaactgagctggccacaacattgcaagaaaacacaactggttgctccatctcacaagatgatgctggagaggccatataggacatctacattgcaaacggtccattgtgggctgggcaggtgagaatttactggctggtttcttccaggctcctgtctttcattacgaaagttggccctgtagggtggtgactctgcagttctcatttatgttatccagcctctcagggcagccagtggggaagccagagcctctgtgagtcagttggggtggacctggatgctgatggtctgtggttcccttcaattcgtgtgcaatagaggccctgacaaaacccagttcagtctcaggggagcctcgatgaatctgcagagtttgggaatcaggagacagagatggtggccagagttttacaactgcaggaacaggctaaggggtaggtggtgtcttctgatggggaagccaaacaagcgaccaagaatgaaggccatatggggccacctggatgtggggtggcacataaagaagttgaggacacgcagtgttgtagggacctgctcaaggttacacagactgtatatagcagagttggcattcaaacccaggccagtctgactctaaaacacttttatttttcaatgacctcaagatgccttccattgctgagattttaagtaagctgggaaagggagccatggttttctgagctgtctggctcagggccatgagtagataaatgcttacgaagtagtcacagttgatcgatcaggtgacaagaatgcccataggcctgtgttgttcttttctatatcttaagaatagatactttcggaaggcatgatccatcatgtttagaactcttcatatggtctgctgtggctgtcttaactcaacctgaagggttagcaccaaacacagctggcgtacgcaggcaacatatgactggacagtgctctgccctcacctcggcctgccagatagatgtcaagggcatcagcaatgaaattaaatggctccatttccttgaagggttaggaggaacttggattattggtgacaagaccaataatccaagaagtgaggctcaatagctgtgcaaatctgagacctgggagcaagaagacaatacacctttacaggtgtgcctggctttaagaaagcccatcatttgccaggggcttctcagttcttttgtatttgtccttcccccatctcagaagcatgaatgggccccacctccctccagggctgttcctgctctctaccccagcctttcttggttctcttggaaagtgagtactccttcaattactgccctggcatctctctcaccttcaatgtcttcctacttgccttggggtcctcttctcagctttcagacatgttcagatttatcccatttaagatgacttttgcccatttctcctcaagctacagcccgtttttctgcttctcaattttctcaaatgagcatctattggctcttaatcacacactcgatacttaactgtttcaacactagtttccctctcaccagtctcccgaagtgctttctgcagaggccgctgcaataaacatctaatgtttctgccactcctcatagcatgcattttccctttttctacagcgaagaaactggaaaactgacttgagggtaaaggatgcaaaggggtttcattgacttctaggtttcactattgactagctgagtgaaagtcaagaggagaatcaagtttgggattgagggttgtggggaagatggcataggtgagattgaaggcacaccaggcctgaggccccgtggggacactcaagagcatgatgtccagcacactgtgaggaaagcaaagctgaaatccccagaggagggagactcaaaagaggataccacagggtgtttcttccttcttccagggagaagaagggagaatgcagactatgcctactttcctacctccttgactttgcttatgctacttcctttcccttttccatattccaattctcctcccagataaccagttcctttttcactcccaacatatgagatttggtttggctaggcatgcaactccagggtggataatatgatcttgacctgagccagttagtgatctgtgcagggatgggcacatgagactttttctgaggctgctgagacaaagaccatttctctttgctgttggatttaaacctgagagaagaaaggccttgggctactaagtaccggtaggtacttaataccacaaggagagagagctgggctgggcatgaagcccacccagagaggtggagctgagaactggagagaaccaaagtaggatcctggtgacatcatctgaatccctgaatcatgccacacctgatgacatccctatttgctagtcttttcaatttaactcagtcttttagctgaagccagctcactgggatttatgttatttccagaagaaagaattctagctgatgcagaaatctaatacaatcatcagtgacctctgaaataccaaaatcaagactctcttcttagtctcctttctgagtatgacccagtgcctaaacttggaaactgatctgggggtaaaggatgcaaagaggttgcaatgacttcaaggtttcaggattcaaggactgacagcaaagagatgccactagcagaggagtgaaagtcaagaggggaaggatcaaaacccaaaccacaggtttacaacccagttcccatacttgttacttttatgcccttacacattgctctaggcctcagtttcctcatctgtaaatggggctgctgtgggaagtgtatgtggcaggctttgaggaaatggcagtagttctttggatgctattggcagacactggtgagtggtggtgtgggtggtcctgaagacatcatctctctaccatattgaacaagcccactactgacccacacttgctcccttccatgtcccctcacctgattccccttgacttgggctgtttgcatcgctcctcctgcctttctaatcacatattctccagttcttcttcctccccacaaatgttggtattttccaaagttctggcctgcactctgctgtatcctattttgagtctccctcctctggagatttcaattttgctttccctacaatgtgccagacatcatgctcttcttgggtgtcccaacagggcctcaggcctcacgtgccttaaatctccccagcgccatcttccccagaaccctcaatcccaaacttgcttctcctcttgactttcactctgctagaggtttctcttttctcagtccctgaggcttgaaacctggaagtcattgcaaccccttcacattctttgcacccagatcagtttccaggtccatcatcttctattctctctctttatatttctcaacaccatacccattctcttccccttgctaccactcttgttcctgctttccttgcaataacctactgaatagttcctgaatggtcttccacactccggtttcttcttctttaatctattctcatgaatgagtctttttaatgaaaatcttataataaacctcatttccccagaaactttcatgattaccttgacttttgaataaaataaatataattcaacaaacattaattatagcacctcctctgtgtcagacactgtgttaggcattgtgaggaagacaaaattaaaatgaatattatatttctagggccttatgatccagtagtttagcttaccagaccataaagcccggtacacacacacacacacacacacacacgtgcatgtgcacacacacacacacacacacacaggtactgaataacgtgaactctcattcattccacacacacgtgcatgtgcacacacacacacacacacacacaggtactgaataacgtgaactctcattcattcccaatctgccttcccaatattatttttgctttcctgtgccttgtgcttaagtaaggatggacgacatccttttccatgatttcctacctccttgactttacttatgatgtttccttttccaggaaaatccttctctccaactctgcttggccaaatcttgtttatcctttgttgtctttttcaaatgaaaccctcccataaatcttttgctgattatcttgttaatgtaatctttttctcctctgatctcccaaagcaccttatatgaatctccacctggcactttccacttttaaaaaaagttagctttgtaacttgtctgcccaataaaattgtaaagtctcttattgttttatttatccttgcatccccaacaactaagacagtgattattgattacagctaagtatgcatttacctgtatgaagcaatgcatcactcagggctagctttttgtactaaaaaggattctttgcctgaaaagttaaaaaaatatttccagcagtttcttttaaacacattcttcaggttcattttaacttggttatgaattatcaaccaccaccctggaaaagatctgtgggttgggagaaattaaagaaataacaaaaaagtagaattataagaaactactgcccattaataattttctagaaaggaaaagagggtagaccttcactgatcatggaagctgttaaggaaacaggattctagtttttagaaatgagattaagacatagcatttactttacaaaacctgtattagaagtaagggcttgatctggagaagctggcatcacaggcatgtaaactctcaatgctactgtacatgagtcatgcatgcggaagaaactttggtcttcatggatttcccaaagggtctcaggacactggtgctgagttagcctaggagtcctggctgccaacaagagtgggtctcagggtcgtgatgggcagtctatctctcctgctttgtgatgacctggggtgaaggattggggggtgtgccatgatccccacctgccccaccagagttcctgagcagggctgggctggagactggctatctagctccctgggcaatgctagtgcaggcgatggaagagaaagaaagaacaggccatttcagaccttctgccaggaccctgggttccttccagggttacaaacaaggtgcagatttggatctgggtggtcctggaaaggtgtctgcctggcctatgatttttccaagatcaggattcctgtctgagtccagtcgctgatgagcccaaaaaccctattgctgttcaccacacatgaaaacctttattctgcagaaaagggaacccagaaataaagccatgcatctacaatcatctgatctttgacaaagtcaacacaaagaagcaacggggaaaggaccttttattcaataaatagtgctgggataactgtctagctatatgcagaagaatgaaactggattcataccctttaccatatacaaaaattaactcaagatggattaaagatgtaaatgtaagacctcaagctatataaaaaaaatcctagaagaaaacctaggaaataccattctggaaattgcctttggcaaataatttatgacaaagtcttcaaaagcaattgcaacaaaagcaaaaattgacaagtgggacctaattaaactaaatcgctctgcacagcaaaataaactataaaccgagtaaatagacaacttacagaatgagagaaaatgctcacaaattatgcatccagcaaaggcctaatatccagaatctgtaagaaacttaaataattcaacaagaaaataacaaataaccccattaaaaagcgggcaaaggaaatgcacaggcacttctcaaaagaagacaaacaagtggccaacaaacatgaaaaaacgctccacatcactaaccatcagagagatgcaaatcaaaaccacaatgagataccatctcacacgagtcagaaaggctataattaaaaagtcaaaaaacaacagatgctggtgaagctgcagagaaaagggaacacttatacactgctggtgggaatataaattcgttcagccactgtggcaagcagtttggagatgtctcaaagaactaccattcgatccagcaatttcgttactgggtatatatccaaatgaaaataaacagttattatatcagaatcttgtggagggaaaaattaaaaaaaataaattgtcctaccaaaaagacacatgcacttgtatgttcactgcagcactattcataatagcaaagtcatggaatcaacctaggtgccaatcaaagatggactagataaagaaaatgtggtatatatacaccatggaatactacatagccatagaaaagaatggagtcatgtcctttgcagcaacatggatgcaggtggaggccattatccgaagtgaattaatgtaggaacagaaaaccaaataccacaggttctcacttatatggggaggtaaacattgggtacatatggatacaaaggtgggaacaatagacagtggggactaccagagaagggagacagggagggggacaaagggtgaaaaatgacctatcgggtactatgctcactacctgggtgatgagatcatttgtaccccagacttcagcgtcatgcaatatgctcatctaacaaacctgcacatgtaccccctgaatctaaaatcaaagttgaaattatatatttttttaaaaacctttgttctgggccaaagtggtcttattagaggcgttgtggtcgccctgatgcaaaccattaagccactcagggctgtccagggcctccaggagcccccaccacacaacatcatccccagacacttgtttcaccttgcatgtttccagggaccctgagggaccctcatcatcagcttttgtcctagccctagaagtccagtcttcaacagaggactgtgtccataactcataaagtttatgggaggattcagggaaccaatacatagaaagctgttatagtagtgccttatttaatgtgagcccttaataaatgttagctaatgtcactgtgcacttattattttttgttgtgtctcacgttcgctgtgtcatgaaattaaatgaccctccccacagagggttgaggagtataatggttgatagcatgaagtcagagagacctgagtttgagtctagactcttcacttactagctgtatgacttggggcatgtttcttaacttctcttagcctcacctataaaaccagtgtaatgatgtctactttgatgtgttgatgtgaagagtaaataaaataatgcaagcagaggtcctaccatgatacctgttatttactgaatgattaaacagtatggaaaacatataacttgtaatcattgtttttagtagtatttctgcaggatatgcaatttggttaggggatgggatcatgcatgaggaatgccaaaacagtgtaacagaccatatatttccaaggagcttcaaggcaaggggagctgggacatgggacagaaggcaagtgaggcgtcctggagggatggtggggcaggactggggcagaggagtagagaggtaggtggggtgcacgtggagaattccatagagaggttctgtgctggttaattttggaaaacactccagtatttaaggagggaaaaagatgaagataattgtcttaaagatccttgtgcaaaatggactctggaatttagatggggagttacgaccacagtgcattcagtcctgatgacctggcatacatctctgacaaggtgggaagtctgcaagataaatggctcaaactaagctcattatggggaattttcccaggagaaggaggagtgaatattatcaaatgggctttgcctccctctctcttgaagcagcccctccctacctccaaccaaccaagagcaatgctgaaaatgattaacaatggaattggtgcttggggtttgcccatagcagctgacgggcctgggaacattctcaggcatgcacccctcattggtccagggccactttgcactgtcaaagtctctcatctcacaggtgaggaaactgagaccaagtcgggcaggaatttggcaatgtgacagagcaaagtgttaacactttgctgacttctccagttcccattatgacttggtgattaagaccagtattgaatccttgctcggctgcttgttagtggtggagtcagagacaagttcaatacattctctgtcccatcattttctcatttgtaaggtgaggactccctccctccttccttccctccctccctccttccttccttccttccttttcttttctttgtaggataaccaacttatttctacaaacccagacctctcactggtttcagactgaaagtccagcatttcagaaaaacccttgccccctggcaaatcctatttgttcaaaaataccgcctcactttgttctaggtgctacagatacagcagtcactcagacagagaagatccctgttctcaaggagcgaacgttctaattctataaggtggagagagacatggatatgttgatgaatcagtaaaataatgaacattctacaaatgtgaactatgtatcaggctctatactatatgttttacacatataatatcattatatttataaacaattctaggagatagatagcaatactaaccccaccccattttccactgtgaaaactgaggatttgttctattaacaaactttcctactgctggtcaaaggcaaagcatctaaaccccagagttccaacacacatgttctcaaccttgatatgccaccatctcacgaatggcaagtgtaagaattagacagggtgaggatcatgttgatttttcctatctcagctggctggggatctcttgtcctacccactaggctgcgtggcagatgctgtgaagggtcctctagagcgcatttgctccagctccaagcaccagtgcagatgctggagcccttctttgcaatgtcacttctatcctagagaggtttagtggggaagcctgatgaccacagcagcttacccagcaaacaggaaagcaagagcacatggaacctgcgggattcctggagctcgggagttctttggctttgagtggctttctgccaagaacgtctaccagcagaagatggaaaatgggtgatgccctagtgctggccagagttctgtgccaaaagagaaaatgaggccattcctctcagaccttcagggctcctggcagatgacaggctgatgaacaagtactgcctgagcttgagaaatatttgccgttctcaaggctgactgttctgtccatctacccaaccacatttatatgaaacttatgaactaatattgttggaagaaactttattcatcacccagtccaagggtctcattttacagatggaaataaaatgacttctcagggtcatacaggttaccaaggaagagaccacaaggaagaaacaggttaccaagtctgggccacaaattgctgaactcagaatgcacagcagttctgcaaaatgcactgcttctccttgtggctggaccttacaattatttatagggaaaatgatttctctcttatacactttccatgtttatagaaggaggctgtggggccggggagtggggctcagggttcagggatcactggctaataatgtcagttggaaagggaactctggaaagtgtttgatatgtcaaacaggtgtaaaaatgctcttaagccaccaatgaggtgtgagttagggcagaaagaagatagtagagtatgagaggggaggaggggcgtcctgagttctcagcccatgctagactacagggagtttgagtcttagactcctgcttcaccattgactccattccctacctcatgcccacccagcaactacatggcagaagatacagggaagagagccccggactcacaggcagaatgggccaggttcagatctcagcttcactgccaccagctgtgtgatcttcagcaggtctgaatccctggcccctgctcccatccctctctttatttctgtttcctcatctgctgaaacatctaagtttcaggtttatggggcaggtcagagagcaagtctacaaaatgcttatcacatggcctggccaagaaagcccctaataaatggcatttgtcaccactgttggtgggaacctcacaatacctgactctcctgcactgcgctgtgaggaacagcccagcgtgctcctcctggggttctccccaaccctggagtgaggcttgcagagcgggcttgcaaagcagccacacccatttgctctgctggcttaagcaggagccagagtctgctctccaggggctcaggatggtgtctgaaacagaacacatggagtccgccaggtgtggcagtaactacattgacaaaactctcagcactacaaagtggataaattagagggcagagaaaatgcattcatgctaggaaagcattcgccatacacttcctttaactgggagcctctctagagaacttaaagtcaaatttccacctcccaaaattctatttccccgtagatatctaggaacttgcctagtgtgaagtggataactgtggagacgctgtcatctttcccttcatcccattttctccctttcctatgggaatttttgatttaatccgggcattgtggacagcagagagaggatgcaagtgctggttggccatatgtgcttggacaaagctgcctgctgtctcgggctgttcaattcactgctgctgtggccttgggccagtgagcaccctgtcattctaagttaccctcaactggaacccagactctgcagaggtgtggtgggcagtgaaggaagaagagcaagcttcgtgatgaccatgcagacacatgccatgacagtcacttcttgtttagtgcctcctgacccctacacttcaggcagtcagaggtcagagatccatcatgcccacctcccagcttactgtctctatactcagctgagcagaagaactcagggccagtgtacccagggctgggcttcctgccttccctgcttctctggccaccatgctgcagggttgatgcctcaggcctttccagtgcatgggcagagaaagggttgaaggcagcagatctggattcaagtccagctatgtgacctttgcctggttccttaacccttccaatgctcatttctcatctgtaagagggaggtggtcatatctccataccaacttgcacaagggttgaatgaggagaagaatataagcgcaaaatgcactgaaggcaccccatgcatgacacttctcgtcctcccctccagggaaggccaatggtaacccagaaatcactggaccatagcattcaaatgaccattgagtccctgcttctggtgtacagaacaaaggagaaggccacatagagcttctttcttccaagactgcagaatggggattagacctctcaggggagtgtggtgcaagtcacaatagctctcttctcccgataactgtggccatgtggcctcgtctgctgcccagtgtgacctcagcctcaaagccccactcctaccttagaaaggttgggttgaggatcccccactccacattctgggattgggcaccacgttcccctcatggctggggcagctctgcttccatggcccaggttcttctaaatccaattctgggtgtctactttccaaatcctcccagactggggttcagttttgacttgccctggccattcttgtgcccatggtatggaggctgcaatccattgacagcactgtcactccccttttccaccctgctctacccaaggctgcgtgggtggccactggatttcacaatacttctttggccagtggaagatctgagctatagcaatatttaaaagatcttaagaagtcacaaaatgtgtatgtgccccgcaatgacaagactttttttagatgcagaaggctctaactctaataaattattatccaaatacaggaaataatcactgttaacattagtagatctcttgcagtgatgttttgggagccccatagactatcatcgaagtcagggggttcttgaactcggttaggtggttgagtacctgaaagtttgtgtcctctttacagaagcaaaaatactgttatttaattcaattgagaggtctaaaaatacaaatgtaggtcaccctatttttatgttttgagcactgtactaagtgctttatatggagtagttcacttaatcctcacaaaaaccttgcggaagtattacaggttaagtctcccttatccaaaatgcttgggaccagacgtattttgaattttgaactttttttttgggatttttgaatacatatttgcatatagataatgagatatcttggggataagccacaagtctaagcacaaaatttatatgtgttttaatataccttatacacatagcctgaagataattttatacagtatttttaatagttttgtgcataaaacaaagtttgtgtacactgagccatcagaaagcaagggtgtcaccatctcagccacccatgtggacaacctgtggttgctttgtgccaccattattcctgactctgaattttgatgctacctaaagcaaccattttcttatactgattcatgcataagtacttaagagtaaaaaataggacagaccattaatacggtgggaaaaatcatgtattcggggtaaccgagcagcacagtagcatcaccagaatacctgtatctgctattaagcaagagcaatagcaaacaatggcaggctgattacctgccactgtgtgcctgcattttgttgtgtgcctgcattttgactgtgactcgtcacatgaggtcagg[132 bp omitted]gtctcctgggttcaagagattctcatgtctcagcctcctgagtagctgggattacagtcatgtgccaacatgcctggctaatttttgtatttttagtagagacagggtttcaccatgttggccaggctggtctcaaactcctggcttcaagcgatcctcccaccttggcctcccaaactgctgtgattacaggcatgacccactgtgcctagcctcaattttggaacattttgaatattggattttcagattagggatgctcaacctgtgtgatcactcactaaggtctgaatgctggtgtcctcccaaaattcttatgttggaagaattgactctccaatgtgagggtagtaagagctgggtgtgagctttgggaaagtgaataagccatgagggttacattctcatgaacagaaatagtgctcttataaaagaagttgaagggaactgcttcaccctttctgccatgtgaagacacagcaataggcactatcaatgcagcacagagggagcctttccagacacctgatctgctgctgccttgatcctgggcttcccagccttcgggactgtgagcaatacatttctactgttaataaattacccaatctatggtatttgttagagcagcccaaaagaattaagacactattatttgttgccatttcataaatgagcaaattgaggctcagggaggttagatcacttgcccagtgtcattcagcaagttgggaagcagtgaatcaaacccagaaagtcaaatcagtttcgctgcttttattccacagttcctgccctcccctgcctacccctgagaatcagaagcaatgtcatcagttagatatgactatgttatgcataagccatatcaaattacagccgttaacacatgggttgactcacacacaaacaacagctcaaatctaggcaagaggtatcagctgtttgataatatttgtccgctaattttgctaattgtgtgctcatttgtcatcctctagtgagtgacagcaggcaaacagtaggaggcaccaaaggtttaagaaaaacatatgggagaaaagcttaactgggaggcttttctgtcttagctttttggtttttttccccctgccaactggaaaaaaaccacaattattgcatttctgagacagaactacctgctctggttcatggaaacccatgttatttcagagatgccaccctgctgcccattggcgacctttcgaaggtgctctcctggtgttctaactcaatgtgctggacagttgtgcctcttcccaccagcatagtgtcctggtacggcagggactctgcagcgtggggggcaggggcacttcaggggtgggtggtaaaagctgaccagaactgtgcagctctgttgtggttcccaccctttgtggagaatcactgctctaaggtgacccatgcctcctcccatatcctctacacctatgctctttatgatatgacccactctttggttggactagggtcaacagctggcccaagtgcagccaaaccatagactgggcaggaagcaagggctctgagcttcacctcaaaagatgaactgtgcctgtcagacccctctcttggaaatgtagtgtcagggctccggaggggtggagcttctgcacttcaggggtacatgggggtgagctgggcaatggccacaatgaaccagagttctcgaggtgcaggagccatgtgggagtccagggagtcagcgggtgccagcaggaaaatggagcagatccacagatggaggaggggatgtcaggggagagatgagactctgagggactaaccaggcaaaatagaagtttgcagcaagtaatagtagtagaagcctgaaagtctgttaggtaaccgaggctgcaaacatcagcctttcctgctcctggcccgtttctgggaggtctgcatgtagggaggcgctcgttcttggattctcatgaaattttccttcttctttcttggcatctttatcatgacccacccactcgcatgcttttactcaaaccagatagcactgccttaaccagggtgcacaagaacgctatttgagttgctggggcctaaactgcctcagtaagtgaatctctgcctcccctcagaccccccattggatggtcagaatctgcaggagactggctcagctcaccattccactgttttgttccctcattagctctgttccccagttagctcgccagcccctttgccttgccctgccctcccagccactgcccccgaccgagctgtttacatggctttctacattaggttagtgctcactcccaagttcccaacctcctacttgactgtgtctcccactgtgatcctttccttagctcctgcggagcctgggctcatttacatttcactcaccaacctcatttaggtaattttctacagttaattcaacgttcaccaagtagccctggattgcatttgcattcatcaccttctggggctctgaagcatttcagagtatacaggcttccctgctgagatccccacttacgcaaacgcaacaacaaatctcgtgggctctgagcagaagatcccgctgcagggtcagcccagtattctcttctgacagcagcctcaggaggacaggaagtgccctttgtcctgccagtcttgtccaaggaggaggtgccctgactctggccttcctgtctcctattaattcattgtgaatccatctctaggtttactgcctgccgtgcaaagcatttccttcaccttagccaaaatagcctaagcttcagggggtgccatctagtgcctgtattattacaaagcttgggaagtagaaaatatacgataaaaggcttcacaatatcagaattgaaaaggtgtggttgcttgtgaacacagtcacagagagcccttggctcataacaagctacttcttggtctccactttgctaactggtggtgggcgtcatggctataagactctcaaaccagcacagcaggcctcactgtcgatgggtgctgtacaggacaaactttttgctttagtcttctacaattgttcaggttagtaaaagaaaacttgtgataatagaagtttgcagcaagtaatagtaatagaagtctgaaagtctgttaggtaaccgaggctgcaaacatcagtaattcgtctttatccgcaaagcagggaaaacgggactctatcacttacgggtttcccctgcctttgttgtatttcaggaattactggaaagaaattgtctgacctggctccttttgtgtttcatttgggcctcaaaggccgtatatttgtaagaagaatgtcactgtctatgtcaagctttctggacagaattctagaaattcacctgtagcttgttcttattccatactgtgccaccctttcacaaccctggttcagtttgttttaagattttctatccaggatctcagtggctgagatgttagtccccatcgtgcttcaggtagtagaataagggctggagaccagagcctgggcccaccatcccaccatcgctgtctgtgaatatgcctcatgctgtgagcaacacaataaagtttgcttcaaacaaaagtatcatttccctgtaggaagccaggtaaaagtgctgagaagtaccactataacagttccttctctctctaccctgagggatgaagctcctgcactgcaggggtgtgtcgaagtgagcttggcagtggccccagtgggccagagttctgggggtacaggagccatgtgtgagtccagggagtcagctggtgccagcaggaaaatggagcagacccacaggtggtggaggggatgccaggggagagccggggcccagattttacaactcccttgtttctttggctgcctagtgcagatttatttatttgtttgtttgtttgtttgtttatttatttattttagacggagtctctctctgccgcccaggctggagtgcagtggcacgatctcggctcactgcaagctccgcctcccaggttcatgccattctcctgcctcagcctctctagcagctgggactgatgcagttttactttgcatctcttcctatgtagcaggatgagccgcagaaaagaacccctcagaaaccgagttgtggaaggaaagggctttattcagctgggagcaccggcggactcacgtctccaaaaaccgagctccccgagcgagcaattcctgtcccttttaagggcttacagctctaagggggtccgtgtgagagggtcgtgatcgattgagcaaccagcgggtacgtgactgcgggctgcacgcaccggtaatcagaacagagcagaacaggccagggattttcacgatgcttttccatacaatgtctggaatctatagataacacaagcagttaagtcaggggttgatttttaactaccaggcctgaaatgcagcgccgggctgtctgactactgatttcacttctgtcttttctttaactcctactttttctttgaggcagaaattggtcataagacaatatgaggggtggtctcctcccttacctctagcttgatgcaaaggagggctggtatccctgctttagcaaagcacagcgcttctccaccccttaagctctcttaggcagctgacagcagcttatcaaacacttgttctgtgtgttgtcaactgggagtgttctcaggttcctctaagccaccagctagcctgaaggtgcagtctgggaaaaggactgctttgctgaatccctctttatgagctagaagggccttctgaacatgggccaggctccatcagtttcagagcgggaggtggtggagtgtatctactcaaaactgcatggggaatgagcgctgttcggccgttctcaacatttcctttaagaaagtaatgttggcgctgattccagtagacctttaaaaaggctctttattcaagtcttagaactgattagatgagagccatgctgggtctgtcgggctcaatttatatcctctctacttctgggctcaatttatatcctctctgcttcccaagagggagctgagccaggccaggtaggttccccagaataggcagggtcaattccaacgccaccttcccagggtgatctggaatgggttctttctccctctctctcccttcaccaggtgctcctgcagaggaacctggtgtcttccccaccccaggctgcaggagctctctgttcaatgcagtatccactggccacatgtggctttgagctcctgaaacatggctggtctaaactgagatatgctataagtgtacagtacacatcagattttgaagacagtatgacaaaaggtgaaatatgtcatgaatattgtttatattgattgcatgtggaaatgataatactttggatatatgaggctaaataaaatatagtataaaagccaggcatggtggctcatgcctgtaatcccagcacttggggaggctgaggctggcgggtcacttgaggtcacctgaagttgggagttcgagaccaccctgaccaacatggagaaaccctgtctgtgctaaaaatacaaaattagccgagcatggtggcacatgcctgtaatctcacctatttgggaagctgaggcaggagaattgcttgaatccaggaggcggaggttgcagtgagccaagatcataccattgcactccagcctgggcaacaaaagcgaaactttgtttcaaaaaaaaaaaaaaaaaaaaaaaaaaaaatatatatatatatatatatagtatgataaattaatttcccctgttttatttttaaaatatggtcactggaaactttaaaagtgcctttgtggcttgcattaaatttctattgggcaatgctgtcctagaagcattttagactgcagaggtttagagatttacagctgagactctgggtgaagagcaggaatgagaaagatcaagaaggcaaagattctgccacttctctgctcaaaactttctaaattttgattccttctgattccttcctcaagacctctgaggtctctaaggccctggaggccttgcacaggctggtccatgtcctcccaccctcgtatgtctcctggagctccagtcaacctgaccttgcttttcagcatagccagccatgcccatcacagggcctttgcacatgctgttacttctgcctaaaacactctcccctggacagttgcatgcttagaaagtcacctcctcaaagaagccatccctgattcacttcctcaatcccagtcagaaccaatcactatcccttcaccctgctttgtttttctttaaaattcttattactccctgacattgaattgcatgtttactttctgtttcctccagacagggagcctctgtctcttttattcaccgcagtgcctggcacatactggatactcagagaatgcttgttcaatgaacacaaacatcaatgctgcaaggccaatgagattcagccatttttcaaatgaataagctcaggcttggaaagaggtgagtacgggacagagcaggaattgatttcagcgactgcaccgagctgtgagggacagtggctgggtgacctgggaagtcacctcttctaggacctcatgcactgggaatgtgccctaatccaggggatgaggaccaacttagcagggaagaaaataaaaccaagagaaaaaggccactctgacttgctctggacatttcctgtgggaaacagatgtcaggattaaaaggaaagagcaggtgtgaggtctcactcgttcatactccggcatcacagaatcctttgaggaggcacgtggggccaacctagacaggctatcaataatcaaggtccttccagatgcacgaaacaggccttagagcctcagagctgcaggagattttcatgcctgccccttgggcacatcccaagatcaggagctcactccttccaaggcagccgagctgttagtttttctgttcactttaatcaacagaacgtatttgattctttcgggtcagcagcgactttcttgtagttgatgtttttcagacacttgttctagttttggacttctgggggcacattgaacagactaattcctgctccctagatcagcccttctgagacagaaggtcacggtggctgagaagctgaacttcccaggaagcacattctcggcaggcctgccctgtgatctcacctgcaaggggacaatttggaaatcaagtattatggcttagcaattcgggggctgattctctgaggccacagccttctccttgctcacccagagtaatgccagttcgaaacggccagcccgacttctcttctgacttccaaactcaaacttgcattttcttgttactttagcaacattgattcaagcacttgtgtgtgccaggtatgatgccacaccttgaggatagaataatgaagaagatatagcccctggtctcggggagttcatagtctttgtggaaaggctgacaagtccacaaggtattaaaacccagcaggatccaggctggaatgaaggcaactctcaagggcacaggccgtgggcaccgaggaggacctgacacaccccgtgggatgcaaggaggacaccctggaggaggcaaggccaatgctgccaatttcccattgcctaccggggagttcagtctgtaagtcccacagatgcttctagtgaaacccatttgtcatcttaatcaagaaagttcaaaatcatcatctcatgctttctttccaccttagcctatctccaacacacttgcatacacccacatgggtgcccatacatgcaaacagagtcacttctatctccttgcctaatctttctcaaacctgtccctccccctcaagctttccagctcctatcaattctcacagacctgtagtgccatactccccactgctccatccctctgccaccccattctccactgtgctggaaaggtcctcatacatactgacatgcaaatgaccatggatccctatttccagcaggcaagactccccagaagctggctgtctagggccctgggcagcctgtccagcaccatccctgtgagccctgcctgcaagcctcaagcgccagccatgctggcatgcttgccctgccccaaacaatcatgtcacactcgttcccacctctgtgctcctttacacacactgccccctacatctggaacaccctgccctttcttttcagcccccaaacctcctagtcatcctttaaacccactcaaatgtcaccttttctgtataacctccctcggacagtcagttgctcttactgagaaaagaatgctgtgccatcatagccattatcatcagcccactagccaaggggcttctccccacctccaggctgggactctcagagagcaaagacagtgtgtaattcatctgtgagccccagaacatagcagagaacttagtaataacattaataaacaatgctattatttattaatgatgaatacaaccagcaatagcaatgaataaaaatactgatgaataataaggaatagcaatgaaaatacctggcatcatcatgatgatattaccatccatggtgccaagccccttgctaaggactctataagaaagatctcatttaatctctcggtatcctctaaaatcctgctcccacattgtggatgaggaaactacagctcagagggtataaatccctctcctggggtcatactttttgtaaacagcagagacgagatttgaagccatgtccatctgatctccaagcttgtgctgtgcgctttagccactgtgcttctctgggacacaaaaagggatactgaattaattaccacaggtgctagagagccagttcctcagaacaccttatctgctgcaattcctgtgacctttcagtatcaactcaaagttatcaattaagctctgtctctagggaggtgagacagggctctcattccatgagatctggctctgccaatctcaggctgtgtgatactgggcaggtgacttacctctctgggcctcaggctcctcatctataaaatggggacatgcaagtccctaacccagaaggtcagtgtggggatcgaacaggagatagcacatgaagagcacaggttgagtttgtggggtgcgggggcgtttggtaggacagtcagtggtttaccaaaccaaagtgcaagctgaaagtttcggaccccagggatcagtgaaagagcttaaagagcccagtctcagggatcagtgcccacaaaggtctggaattctggatgtcaggataaagagagttgacagggagactgagattcaccctcaccctacacggggatgttttcctctgaccccttttagcttccttttttggactgcacgtggtctcagaacggggcctccacagcccaggcgaggtggtctgtggacatggctcctgtaagtgcccaccagacagagtgtgaggcagccaagctgaggtcggcactggaagagcccaagagaaagcttgggaggtccatggtggccactgaagtccagaagacaagacagacttaggcaggccagaagggaaactactcctctgtgaggggctgggaggacagaggaggagcccaggtgtcctgtggagaactgaatttcagaagaatttcttgggggctctggagcgccccgcagaaccacctcaaggcaagagcaggaaccaagaggcctctgagttcttgctgtatgacttggaaaaatgttccgcccctccctgggcctcgtttcctccactgtatgatgagggagtgaactctgagatcacgtctatatcgatcaccatcattccatgtgacctgaagagacaagcatgaacacatcgctctaagcctcagtttcctcatgtgtacagcaagactagaaatggctgtctgttaaggctgctgtgcgtacagtgcctgggaggtagcacacagtaggtactcaattaattcccaccctccacctccaccaagcccaagcggagagagttagagtcctcctgtctgtctctctcccttcctcagtgactctgggaggctggggttttcacccactatgccagcctagcaactggcaactgggccatccctgctgggaaatgcctctttttggagatgaagtctcactctgtcacccaggctggagtgtagtggtgcaatcttggctcactgcaaactccgcctcctgtgttcaagtgattctcctgcctcagcctcccaattagctgggattacactcacgtgccaccacacccagctaatttttgtatttttgatagagatggggtt[131 bp omitted]ttttttttttccccatcagaatgtaatgtatactcattaacagagaaactggagcatattggagaaaagaagaaaaataaatcacttgtgactctactaacatttcatagcatgccttcctttttctatgcagagtactccttaagtgggtaaggtcattttcaatattcaatgtcatttcctggtttcttctacttaaggctatcacaaactttcctatgttggtataaacatatttttaatggctgtcctgagatttccctagccagccctatccacattgccaggtattcatgaagtttccaaatgtccagtcttctaaaagcaaagagccacggatatttaattcattgagagttttgtttgtttgtttgttttcccccactgcttttagaaaatttttttttctcttagcacaaactgccagaagtaggcttctggtacaaagcagatgatgacttttagggctggcaatttctgtcctttgtgggcaacattgccattaacttactgatgacttggggtttccagagtcctggataaagaagaaaggagtttcctagggaacaagcctaaatctcctgggaagaatcagtgagagcctttaagtttatttcctccttttctggcctggtttgaatagagccccagggcaggagggtttttctgagctacctgaactttaaatacctgcctggggcttcctttactgaatcttatattttcctccctgtgttatgccaaggtctgggagtttggagggatgccctaaacgggacaaaaaggggttactggggatcagggagtaggaagctgggccagcaccagagcccctgatttcttcagctgggggctccctccttatccaccttcaagttcactgccccctaccacacccaatgtccctgatattccctcccaccaacgctagaggctgtttccaccatggctagactctggtgacagtccatttagctggtgagggctctgaacccttaccagctcctactagctcccttcttctggaaaaggtgtcatgttccctatattcccagtaataatatctgagatttataaagcacttgtccttaatactctgataaacttcccttgtatcatctccagtcatcctcacaacttcctccagatgagctctatttgtcaagggagaaatggaagacttagagatggagagttatttgcccaaggcaaacaattagcatagggtggaagtgggatttgatccaggagggctactgtgtatgcagtgcctgggaagtgcccagcctaggagctggccatcagtaggtgctcaattaattctcaccctctacccacctccaccaagcctgagaggggacagctagaggcctcctgcatggctgtctccctgcctcagtgactctgggaggctggggtctttacccactatgccaggtggcaacctgatcattggaccatccctgctggaaagtgcctctgtgctcagactctggcctctgctctctccccattgaccggggtcaataaccatgcagtacagactgtgcttattataacttctgtgggcactgcccggggccagccctcccacccaggcagttcctgctggcctaggtcctcctttgaaggcttacttttcatggtccctgccagcccattgttggggcctcaccccttcttactgcccagacatgggatgggacagaaatttctgttgttctccatagctgttgtcacaagatagtaaaactataagcttccttaaatatcacaaggacatctcccgtttgcctcatattcaatatagagtcatgccatgattatctcattaatccccccaattgccctgtgcagtagagaaaacgaatcagagaggtcaagtaacattctcaaggcagtactgcccattggaaattgaatcagaactagaaacaatatctcttggctctaggcctggtgatttttcttttattcaatctcttgttttttagaagagagctgaagttcagagaagggaagaggctatctaaggtcacaaagcatgtcagctgagaaagcctggaactagactcctctaattccctggatcccctgcataaaaagcaaacagagcgtgaatgaatcaagaaaatgcacactacagagtgcaggctcttccaaatcctggagacaaactggctgtactggatttctacagtggagtcaattccacagagctggtgtgacccactgtggactccagggctgggatgaagtaccacaggatggtgagcaggcagctggaaccagaccgctgtggcaacaaggtgtccattcactgttgcccacggcagagcaggggtgtggccagcaatgctttcctctgaatctggctcatgggacacatgatttctgtccctgctgcagtagctccctttagacacaagttgtaaatagggcatttgggaaaggtggtgctgctggttactgttgaggagaccagggttcttatttgcccagaggaaggccagggtatcggtcatctcatcaaggtgactcctgagaatttggatgtgaataatggcagggataaaagaaagaaaaggaggagaaaagggcctaccctgcgtactcatgcatcctctcctttaatttctcaccttgacctaggagagcaatacgctactctaggtaagccattgtccaaggtcatgtggtcagcaaacaaccctaactaggcagcgtgcccaactccgaggatcataaggtttctattccacttcctgtccccacctaaccagtaagttggcccttgggcttatcatgagtgaggacttcagactggttcactccatgatttctatggtaatctttaacatattctgggttccctgtagaagctggttggccagactgtgccatccagctgcaacagcagtttccagagggatcaccctgaagcatctctatcatctagtgctgctcttcactgagcaaggcctaatctcaggattgaggaccccacagtgggcctaaaggcagagcatggataaattgcactgtggtttcagatatgagtgatacataaccccctccctccctccttcactccacatccatcccttccttccttccttctttccttccttccttccttccttacacattaaattgaacacaacaatgcactgtagtaggtacagtgctggagataaaacagttgacaaaaatatagttcctggcttcccagagcttggatcctagcaggggacatagttatctctcacataatcacaatacacaaatctttgcaaattgagacaagactgttaagcaaaacacagagtattttaaagaacacaatgggggatctgatctagtcttggggtgtcaagagaagcttggtgtttgacctgagactcaaaggatggtggtgatgcactgtagggcatatgaccgccccgtggcctgctccctagaaaacagaaagaaagccagggcagctgtagcccagacggagtgggcctgaggccaagcacagcctccagggccaggctgaggtgtttagattccattctaagtgcggtgaagaactatctaagtgctcaggcagcgactggcagtgtcagatgagcagcaggaaaagatcttcctggatgttgtgcagagtggagaatgaggggccaagagctgatgcagcatgaccagttaggagtctaagtgcaggagcctaggtgagctcaactgtggtggaaactcatgaggggccagacgagcctccagccctgccagggagtcctagtgagtggttcagggatgagcaggaaggacacttgcagcccacacagacaggagagtctttcagatcatccctctcccagacgccctcagaagaaaagcttcagatctgccccatcccagtgggatcctgcaggatgaacccagagtggtggcaaaaagggtgcaggcactgcaagggaggcagccgtactgcactaccaggggcttccccagggctgaaaaggaaccccaccttatccatagcagcatcctggagcccaggtggctcatcccaagtgggaccccaagagaaaggccaatagagacatcatctgctctcagtcccagacttagagatgcagctatatccaatggaagtagatagagggagctgggggtctctggctcagcatcttctccactgggggcaaagaaactgggacagcagcagtggtccagagagaggccagcccacagagcagtggctatttctatctatgttggctcagagtggagcaatgaaagaataaaggaatgaaaaggaggtcaaagggagtttgggaggggatcccctgtgcttctgcctgggacataagagagaggtttgctcatggctggagtctgaaatcagaaagcacttgcaccaggacagggcaggatgctgctgtgagcctgcagcttccactttaagccagagaaaggctgtttggctgctgttactaccaccccggggcaactcaggctaggaaggcaggtgttgttggggagatatataacacaacattcccacagagcgttttcagggctagaatatacgtgtaccgggaacaaataaacgaggtatctggacaagactggcaggaagctaggtgctttgagtaggctgcaggaagagacaacagctggaccaagtttccaaggacagatgagaggtcgccagttggggaagaagggagaaggcagaaaaggtaccaaagttgcgaggagtaacttaagcaatgcctgaaagcccctggagagctggggaatccaagtgtcacagtcacagcttgataggtgggttcctgcagcagcagcatcactattcacctccttctcatgctgaagaggggaactcaacccctcctaggcccaagtagggatgtgccctctatcctagaatgtcttagaacctgtggaagtcacctaatgatggaggccttatttcacagatgaagaaattgagacccagagaagtgcagggtctaactcaagttcacacaacagccaatggaagagccaaggccagaactcagaccctctgccttccacctccttttctcctttacagaagctgccctttttctggttgggtgacatgagagtgtgcgggaggcaggaattggacagggcacacgaagtcactgattaatgagtggtgagtcatctctcagtgataatcactatggaaacgagtggcagagacaaattggggccctgaagtcaggggtctagttttttcattcctgacttcacattttgctagaggaagatggtgtgtgttgctaagacatggtttaagttgaacagcaagggctgtacttagcttcatcagccgagcaatgaaggccagctaccatcccagttttagaaaatgtgctctgtgtcacaggactgaccccaaagtcccaaagaggaacttgcctttagggctttcagacctatgctctccacagtaatagttgggtatcaccattccagaagcattcgtccttcccaaagtctcaggatgttaactttgcaaaagatcttagaaggtgtaagttccgaccttttatcttccaaacaaaatctcatttaatctcatgcaactatgaggtaggtactattgtacctattctgtatatgtgaaagctaaggcccagaaaaaggaatgatctaagatcacacaatgaggaaatgatagaatggaacttctgaattctggacgagccttttattcttttattatccagtacagtaaaaatataaggtattagtctatctgtctttgcccctgcaagggggaaagaggagaagcgcagggaagaaggttgatattgtaatggagaaaccgcagaatgagaacccacttccccatctgccctcatgtccgcacttcatctttgaaaactccctataccgcatgtttcaagagagacacaaaatgggagacaacggaagaaatgaagagagaatatgatcaggtgacatttgcatggcactttatagtttgcagagtgcttccacagccctccctccatttcatcctcaaaacaaccttgcccagtaagagcaggtgcaagtacctctgtcccaatttacagttgaggctgcagaccctagaaggttaacagacttggattcaaatttaaacctcctgacaccaaatcctgcagtttttccatttacattgactttcttttgcctgtgcacgagtgaaaatataggagaaagaagccaacattcattgaatgataatagtaaaaaaaaaaaaaaaaaaaatggagaaaataaccacagctgctagctctcattgtgcatctgctgtacacaccaggccttgtgctaaatacatcacatgcacctgatctcttaatccacacaccaccttggtagggtgagtattgttatccccgttttattggtgaagaagctgagattcagggagttctgtgcttgcagtttcttcttctgattcaccctcggagtgttttgtttccttgtaattcagttatttttaactataaaaattcttagaggtttatttgtggaaaccacttgcgtctgaggatgaaggcggatcctagataggatttgtgtcagcttttgacaacctgagttactctaaaagaaattcttgtcttgaggttttcagatcactcaggtggtatcacaagttctgtctgaaaacctgtataaggacttgctgatgtttctgaattttcagctgcaatttattgaccacttccactcaatgcctacatttaagattgtttattttccttgcacttcccatggagagataatatctgattcatttgtatcctgagggtgtgacccatagggtctgagctttctgtggagaagaactcctatgagactacccagccctgggcagcaacagcaggagaaacagcgccagtttagcatgaactttcatatccctatctcattagcctcaggaaggagccttgatcattaggaatgcaccaaagcatccatggtggttcagagaggagactggtgctcacagggagaggcagacagataaaagtaagaagaagtggggaaaggaggtgaggccaaggcagtcgagtagggctggatggagaggagaacctgtgaggagaggaaggtgagtcaggggagcgccaagaaaacagggtttcaggagcgtgtgatgtgggctagtctctgagctgtgctttctttctgtgccaaagtgaaacacttctgccctgcctgctcctcagggttgccctgccagagagatgtactgagaatgagatgagctaatcgtgctgaaagtccattgcacactgcaaagtgctaccagactcaaggctgcaggggttgtggcctctgtccctcttggccatgatccgtgcctccagaagagtgtgatggaggtagatctgatggtaatctccaccaatgcgtaaaatggactggctgggacaccatcctttctgcttccctcacccctgagtctctcctgaagctgaacattggttccccaatagaaaaagagccttgtcctgccaagggttgctgagcatccactggaaactgtgtatcagctcttaagggctgagcagatgcctaatttaagtatgatctcatgtgattgctgctgcctgctgtagggcaactctgtagaagacagaggctgatgccaggggcagcagcttggcttgaaagctcaaggtgctgcttttccaatgtgaagtcttgatctccagtcacttaacatcccgaacctgtttttccatcttagaaagggagttacaatgtcgatttcacagaattgtctgccagaggagtgacatgggtaacacattcacaacctcaaagctcagcacaggcataagggcttgcccatttttttttttttggtggtctcaggacttgtgggctcactgatacagagcagcactagggtcatgaccaggagggctgttaactcagatggaacaaggaggcataattggtttagcagaaaataagtttggagccaggaaaatggtactagacgacaaatacaaaggataagagaaataaaaatgggagaatgggcagcaatgttgctaaccgagaatgcccaaatcagcaggcttagacatggcaagcagattaagcgggcagttcagagctaagatcaagaatgccttctgagcctagagcttcctgatttaggctgcatatggcttctgtgtcaggggacaccatggtgacctaaatgaatcccacaaatcttcaccaggtctgtttaggtctccctgaaagtttggcaacaagaagctccgtgatctgactcagctccccacaaaaatacatcaatccactttccaacgatttgcttgcatccagagccagcttctggtcagagcagcaggcagtctcagaaacaataaaccaggccctgataagtggaattcatgccccactgaccacaagtctcaaagtggacaagacaaggagattaaagcataaagatccataatcagattctgacagggaaatcccatttgtggtgcttaggaggcatcctccagcatgcaagatgaaagtcagagaccatcagaccttagcatacgacatgccactgggcaggtggatcattaactgtgattaaggcactatgcacctcctaggtggtgaattggaggaggggaccagatcctattactggtcactttgatctccatgtcacagtcaaggcggccactgcagctcaagatcctgcacatagacctgcataagtatatgaaaactcttatttggagatactcagaaggctgatgatgttgccatctgtccatcttttgagaatccttctcttgtcatcttaccatgggtgaaagacgactgggacaggttgttgggtctggggggcccgaggctggagggaaatcacagtgccctctgctgtagcaaaagtgccaacatttctttgaatgctaaaaaaaggtggaaactgtttagcctggccttgaatcagacctcttctgagcaaataaagacctattaaatgcatggtcatcaagacttagtcattggttcatttgtgcattcactgattcatttaacaatcagtgaatatcctctgtgtgcaggcacagtgctcaatgctgtgacttcatatagaaatgaacgagacatgttcactgccttctaggactcataggctagtggggctcactgcagctggcaagagagggagcaaagagagatggagaaggctgtcctattcagagtctaaacccagagtcaaaatgaagggaagcaacactagaaacaggcagttccatgtgggtccattgggaaggtggggccaggggacaagggtcatggataaagctggcatagattggcttacatataggaaagagtagcagagacagggccaggaaaccagatttgaactaagattggggagctcccagaaggatgcaggaggatgttagtctggcagtttggggtgaaggggaggagatggggcatatatgtcctctccatccacatctctgatctgcccttccctgcacctgcacccactgagattattgttataaagttctgagttccactgagtaatagaggagaaccaaagttttgcaaatctgatggaacatgaaataagagaggacatgaaatctgatgtgtagattgtaaagcaattcacagttccgtctgccctgtagcagtgtaaacatcacatatttttaatcaagatggaaaagtaaaatcaaaggaaaactattagcaccatctcatggggagatctatctttgccactccagactgtgtctcccctccctctaggcatgagtagtaagagtgttgcctgtctgtggagacacaggcagattctccaggaaaaggagtacagctccattggcgtttcgctctaattactgctcttagtgggacctctacttaggccttaaagattccaacatcaacagtgaactcaattataatagattaaatgctctaataagactcatgtacaaggtgctgtgggaacatagaagaggaattgaggatacaaggaaggcaccatagaagtagtcatatttgagctgggttttgaaggataagtaggagttcacaaaacagagaaatggagaaggaaagctcaggcaaagggacattcgcatgcaaaagccacaaagaaggcatgttcgactggggactggatagcagtccaataactcaggatccattgaggatgaagatgaatgaatttccatccatccttcaaagagatgaattctgaaaatgtctggagggcctaaagcacaaagataagttgtgttcaattttattttctggtcaaagaggaccatcaaattgcagctatttttctttctttgtttggatggggttgttctaagttacatattatgtatttttaccagtgttaaatattttcagtttcttattgctttaaacatgaattaagattataactaatatttactggatattctaggtattttagatgatttatctctccttgatcttaagtgctaactaagcactatattatttctattttgcagaataggatgtgaagggtgaaagatattggcagccccttgactgaatcttgaagcctgtaagtggcagaatcaggatttgaatctaggtccatccaatttccactgtactgtgctaggtgggtgctaagggctggactctgatggggcagaagggaacactcctgcgtgggaggaagaacagaggtggctgataatctataagctgaatttgacctctgctgtctccagcctgctttacctcattctgcaaagacaaatcatctggagaaacagattcaatgctctgagcctcactcggcaccacagagctccagagagactggctggagtgtggggatccaggctcccgcaggagcctcattttgtcagtgaagcctttagagatggcatgtggcctggccctttgcagaactggccagagatcacacaatcacgggctcagagagttgaaagggaccttaaggtcacctaatcctccagatggaaggcttctgccctgggatgcccactcccgccaggatcacaggcttacacctcaaacgccacctggcctctgactgcatggtgccatggcctcaaacactaagtctgcactacacagagaaggcgtgaggactggccctggctttagaaaacctggaatccaagagctgccctggcttccccgcttagtagctgtggacttcggcaaatgacttttcctcttggatcctcagtttgagcatctgtaaggaagattgtcaatgcctaccttacactgtgattgggaggattagacaaagcaagagaagggagacagtggacactgcatgaagataaaagcaccaagataaaggaggatgaagaagaaggcaatgacttatagcagaagttgtcacacttcttttgtgaagggccagagagtagatcttttaggtatgcaggccaaagggtcttcgttgcaactactcaattttttcactggaccatgaaagcagccacagatgatttgtaaagaaatgagtgggactgtgttctggcatgtctttataaatggacatctacatttgagtttcatataatgttcacgtggcacaaaaccttcttcttttgattttttttttcaactatttaaaaatgtaaagaccagtgggccatgcaaaaacaagtggtgggtcaaagtttcactaacttgacttgtgggtgagttttcttcagcgtaataggaatcctttgtggacacaaagtgattgtgccatgtcttttgggaaaatctctcccatggcagggcacgagcgagaactggtcacttctctgaggaccctgctcagtgcagatgtcacactgccccctagctgttcgctggccatagactagcagcttatccaggccagaccatggcttttccaactcaaatctgcatagcctggcaccacactggacacagaagatactcaatagattcttccacaataaatgactgtgcttttgtaaatttataagttttatttttagaaaaattaaaggtaccgcataccttttctatgctgctttggatgtctatgatttcttattttattccaaggaatcaaaagaattgatgaggattatttaaaaatacacattaggtccatttttacaaaccatgcgtcatgtcctccctcaaattccataggcctgcttgccagactaattggacagataagcaaagttactggcatatatgaacctcagtttcctcatctataaatgtgggatcgtgtttggtaccaatcttatcaaacggttgtacaaaatggaagagatagtcatagaaagcacttagcacactgcctggcacctagcaaaggcttagtgaggattaattattattttattattctccaagacagaagttactgtctacaattcccaatgagaaatgaaaactcagagagcctagagatgtacctccaaatcagagtgtccactttcgaatcctggtgtggccaaccccagatcctgatccttggtaggtggctgaatcaagactcaagccaagtctgactgtgcctcctgcaagacctgggtcttggagaacagtcctgaggctgccagaggcagagggctctaagaggttgaaccatagtcagaagcagctacctcagagggtgtgttaagaaatccttcagggtcattgtctctaatcaggcgcttttgctgcgtggccttcctgggaacttcaatttccctctcagcccaagcacctctagagttgattaccagggagggcctgcccactctcagtgcagacccagaggctgccgggtaattgggcctactcctccagctggagctgacctacaggaggaccaggcctcttcctccacacacaaaaagaagtaaaaccaaaatgaaatcagattccgtaataaatgcagaccacgttccctcagccaatatcgagacaaagtctattctgctgcctgtcactggaaaagtaataaagcaatagagaagtgagttataaaaaacccaaacgacggatcccccttctgaatactgaagggaaggtggggttgggagatggggcagcaatgagtggggacctggagtcccagcttgctgaagcaagccaggtccacagacatcacctccaccagaactccccatgcccactgccttggccatgtggaggctgaagttcagagaggggaagggaccaatgacagccacctgaaaggtcagaagaaaagtcctgatgagaccctgggtcccctcatctgggtccagtgctttctggggaatctgcaagggctggggtgctgggtggtcctgaaggcagctccagccttttaagcaccatccctgttgccttttgcactttctttttgggaaaaagcaagtgctggcctgctggcaccagctcagtggtggcttagcacttacatctcttattatattaactgtcagttaacaaattgatcttcagaggtatgatttagtccctcatttgtccaggcctgatctattcattgggaggtaacaagtttagagccagaaaaacctgattgtgaatcctggctctgttgcttattagtcaattaatctctttatctctcaggccatccattttctccattgtaaacaagaatagtaataacatatatttggcaagattattatgattagtaataataataacaacaggtatcatttcttgagtgctcactataaattaggtaacatagtaaatgatttacaaatactaactccttccaccttcacagtggccctcggtggtaggccctgttatgatttccattgtacagatgaagaaaatgaggctctgtgaggataaatatcttgcttaagatcataaagcacataaaaggtagaactgagatttcaatccaggactctccgactccaaagtctatggtgacctggaagctgtgccttcctgtgctgtattaccatggtccccgttcctttatgctctgtggccaatttccattttcagcttaagaaagaaagcagggccactgagatgatggagcagcagacactgtgggtgcctatacgctatacctattcttccctcttttttcttttcttttttcttttctttttttctttttttttcgatggagtctcactctgtcacccaggctggagtacagtggcgccatctcggctcactgcaacctccaccttctgggttcaagggattctcctgcctcagcctccagagtagctgggactacaggcgtgtgccaccacgcctggctaatttttgtattttttttttttttttagtggagacagggtttcatcatgttggccaggctggtcttgaactcctgaccttaagttatccacccgtcttggcctcctaaagtgttgggattacaggtgtgagccaccctgcctggtctcttcctcctttcttactgaaagaacccttttcttttcaatatcacccttgatacatttcagaggaggggagcactggttacacacgtgtgatcaatttgtggaattctattaaattgcatacatatagtaaatgcattttgtgcaagtatatcatatttcaatgttaaaagttttgaaaaagagaaatagaccccatgatatcttcaaattgctttcaactgggagagagaaagagaatgagagagaatgagagagaggagaggaagcaaacatggcaaatgttgaacaatgagtgaagagaagtgaatactggtgctcattctaatatgcttccaaattttgtgtagcttagaaatttatcaaatcaaaaaggtggggaagagatagaaggaagagttagatccttccctccatctggataatggagtgaggatatgatgtctggaacctcagtaggcccatctcttatatgcggtgctatgtgatcctaggcaaggtacttcgctgagcttgtttcctcattcttatcatgagaataaaaataggaccccacttcttagggctgctgtgaagaggaaagaagctaatatatgtaaattatttattatgatgtctattcacatcatgcattaaagaaaacaggagcaaaatgatggaagatgcctgggtccttgatgatatcatcaagtcactgaactcgtccaaatacagcctcatttgcacttttagtcatgtgagataacatacttactctgagtcattacaatttgggcttttaaaaaattgctgatcaaattgcactccctagcctaaggaaaacatttaaaattcagatgaagatgtattgataatgggaaaaaagtaaaaaacatcctaattatgtagaaataaaggtaggattaaacaaactatgtagggtaaaatattatgtaaccatcaaaaagtgatgtcagaaaattgtttcatagcataggaaaatgctttcactctaatggtgattcctgaaatatgcaaaaatgtaattataaaaggttggaagaaaataaccccaaatatgtatagtaggctagatttgagtattttaattaaatgccttaatattttttgtatttaaaatgactatcatatattattttataatgggttaaacagtaggtttctaacctttatttatgacatacacaaatattagaaacaaaactatatatttgtatgagatcatctacatacaatgcatttaaaattgaaaaaaataatgtgttaagagtaattaccactgagatgtgagattttgaatgacatttctcctacctttttatatacacgtgcacacatattacacattttctacaatgagcacatgctgctttaaaatctgaaacaaatccaattcttaaaaataccaatttataacttttacatccaatatcattgcttcaaaccctatgtctggtacttaaatcaatccaatagattttcattgagtgtgtaatatgtacctaatactgtgtgataataatcagtaccctttattagacactgtgatcgtaattttgtatatattatctgtaatattttcagtaaagtattgaatatacatatcacaatagaccagattcaaatcctggtctattgtatctacttggttgcttgctctcctccagctgtagttaaaaaaaaaatcatataaatcaatgcagtgtataaaccctgtcaaaaaataaaaaatctcaaagaaggatgaagtgctttcagcctggtaagatccagggaaatttcaacaacaaggtggcaatgtgcagaaccttcaagcagggttgaacaaggaagaggccagcttcctgaatgaggggagtgttgtgggtggtggcttggacgggagaatgtgtcattcaatgctggggattgcaaactagaccatgttggttggggtaaataagtatattaagaggaaggatcaagaatagaaactatagattaagatgatagagagctctgaatgtgaggctttggaatttaaatttcatttgctgggcaatggggttccatggtacattctttgggccacagagggtggggatgggttttggagcacattgctttgatgagtatttaggcaggaccacaggagtgaattagagaaaggaacctgggctaagcctgccaacatccatttcttcttttggggaaacaaagggacagaagttttaaaaactgtccagagttaacaaccaagaatgagacaggttggaaccccaggctatctgacactgttgcctacccagcatctgtggaggtgggatgcagcagcggtcaatgcaaggccaggcaaaaccgtgccccagccctgagatggggaggagtgtgttgtgtgcagcagaatgtggaaagttctcaggagtgtggtatctgtgacccaatcacccatcagcatgtgtgggagcagtcaaactgggccacacatgatcctgtagatttaggaccctccctgtttttgctcactgctccatggcagccaatatgcctaaagctgggagcaagctcccaatcccacctggggcatcccgggaggcttattacattgaagcagcaagcagagctccaaggagcaaaacgtctctgttaaagcaaaacatcattaagatgagaagaggcagtgtcttcaacacccacacagtgccactggggctgtaaaatgtgcctcaaaattagacatgggaaagagcttcaccagtgctgactgttcatccccaaggacaagggtagcctgattccctctgacttcacccccagctctgccacgaagctgtgagtgttttgtctgagtctatttgagatgtcttatgcaacagaacctcatttctgagaggaaatggtttgctttctttcacacaacattcacattgtcaggaaagtttccctgacatgcagcccggtttgcgcctttcttgcttataagaagaaccttgaagtctccaaggggatatgttccttaagaagatgttcaaaaccctaaatagactgaaatgttcttctgtggggaagagtattacactgagtactaattcattgtgctgcatttgagaggcaggatacaaggtgtaaagttcttatacttgctttattacactgatttcttgcttgcatcaaaggtaggtaggtaggatgtaggtcaggggttatttttgccattttacagataaggaaatgaaagcttagagatattgatgacttgaccaataagtcacactgaaattaagcagtagaaatgggtccatttactccaaatccaaggtctttctaataccacactctagccatcactgttctgggcaccatggaagtatggccaatgaagggtcacctgtcccatatgtgttcatcattaagttactgtctttccattttaaatccacccttctctgtgcagctttgtcttactggtgctgccaatcctattttcttgccatctgggttaacattaggttgtgctaatagggggcactagaggaaggttgcaaggatggagaaaaaaaggacttccagcttgcttcctggtggcttcctgcctgcttctgttcctggaagcttcaccccagtggtgctgcttcatcttggcaggggtagttccttcctaaagcagcagctgaactcagtatgtttttttcaacacttgcagaaccagtggtatgcattccaccacccaccaccaaaataccagcaccagctggcaggcaccttcttctcagtggtctgaagccagccccacgggacccctcctatgttgagctcagagacaccagcactagccaatcagcatctccctctcagaggtctgagctccagcccaacagggcccctcctccaacgtcctgcattttaataatcccaactgcttatgttttttcctccagcccaagggacagtggatgctttctgtagtagctactacttctgtaaaaccttagtgtcctcttttactttttcagatacctggttaatgaatttacacctagttaaaatttttgtattatgttctctccattcaaatgcctgggatagttcctatctcttgagtggccattgactgatagacaagctgagggcccatcattagactattataattaatataatataatgagtgatggactcatgaaacaaggtagagacaagtcagaggtagagtgcctgacacatagtagggctcaagaaatagctaatgaattgaaaaaaatgaatcactgaataaaggaaagtcttagtgttgaaggaatgcttgggcagtgatccaagcaggagagtcaataggagcgggagcgctgggaaagcgctcttgaagaagagtttccaccattcagagaatgagggttcaaagtctgaagtgggttgtatctcaagaattgacctgagagaggctgtagcaaggcgaggctagggttgtggcacaagtctaagttctttcatatttgtgagggagtgaaaaactcaaccaaagggagtcgggtagccctggctgccccttcagtcaggaaggtgtcacggaagctctgaacccaatgtctctctccacatctactttccaacctccatctctgctttccaagctgcacccctgagaaggagtaagaaccagctggggaaaagccaactcaggagcctacctacctcttactaatccttcaatatcagcttaaaactcacgtcaccagggagacatttctcagccccagaggaggctggtcccccactgtcagaaccccatagcagtttctcctcctaacagtcagcacacttgcagccatgtgttcaatgcctgcccctaccccagaatgcaagcccatgaacaagtccagttctgtgggtctgccaaataccgtctgagattctcaagtactgacatcatggcagatcttgacctggtccccagctagatgagcctgctccttttggttctgatggcatatgcctcactcatcctacagctcctgagagctgggacagttgcctacctctgcaagtagcgaggcttctgtagagaggcaggggatagctgctctgtggccacctggccatgggcctggcagctgctgccctgactgctcacctggctctgacaatcagaataatggggatttattgtcccttctctctgctaatcctagagatgagggatgagcatctggaaaagctcgtttggggttggtaatgacctccaggagggaattctcacacaacttctaccatgcccccactcatacacctacctgtccctacatatccaaagctctgaattcgactctgacccagatgctacaactatcttctttaatccaggtgcatttctgtccaggcaacctcaagcacaaaggcgtagaagagaagagaagcaacatgcccttggagtccacagaatatggaaactagcctgactggagttgaaggtctcttgaggatttatgtagtaggtacttgctgtattagtctgttctcacactgttataaggacatatctgaaactgggtaatttataaagataagaggtttaatgcactcacagttccacatggctggggaggcctcacaatcatgatagaaggcaaaggagtaacaaaggcatatcatacatggcagcaggcaagagagtgtgtgcaggggaactgccccttataaaaccatcagatctaatgagacttattctctatcatgagaatagcatgggaaaatccaccaccatgattcaattacctcccaccagttctctcccatgacacgtggggattatgggagctacaattcaagatgagatttgggtggggacacacccaaacatattattccactcctggcccctcccaaatctcacgtcctcacatttcaaaaccaatcatgccttcccaacagtcccccaaagtcttaacttatttcagcattaactcagaagtccacagtccaaagtctcatctaagacaaggcaagtcccttctgcctatgagcctataaaatcaaaagcaagttagttacttcctagatacaataggggtaaaggcattgggtaaatacactcattccgaaagggagaaattggcctaaacaaaaggggctacaggccccatgcaagtccaaaatctaatagggtagtcattaaaccttaaagttccaaaatgatctactttgactccatgtctcacatccaggttatgctgttgcaagaagtgagctcccacagccttgggcagctccatcactgtggctttgcaggtacagctatcctcctggctgctttaatggctggcattgagtgtctgtggcttttccaggtgcacgatgcaagctgtaagtggatcgaccattctggaggggtctggggtctggaggatcgtggtcctcttctcacagctccactaggcagtgccccattggaaactttgtgtggggggtctaacctcacacttcccttctgcactgcctgagcagaggttctccatgagggctctgtccctgcagcacacctctgcctggacatctaggcatttccatacatctaggaggaggttcccaaatctcaattcttgtcttctgtgcacccacaggaccaacaccacatggaagctgtcaaggcttggggcttgtaccctctgaagcaatggcctgagctgtaccttggctccttttaaccatggctggagctgaagcagctggtatgcagggcaccatgtccagaggctgcacactgaagggggggtcttggacccagcccatgaaagcatttttcctcctagacctcccagcctgtgatgggagtggctgccacaaacgtctctgatacaccctggagacattttccctgttgtcttggtgattaacatttggctcctcattacttatgcaaatttctgcagctggcttgaatttctccccagaagatgggtttttcttttctactgcatggtcaggctgcaaattttccaaacttttatactctgtcacctctccagtgctttgctgcttagaaatttcttccaccaggtaccctaaatcatctctctcaagtttaaaattccacagatctctagggcagggacaaaatgccaccagtctctttgcaaaaagcataacaagagtgaccttggctccagttcctaagttcctcatctccatctgagaccacctcagcctggactttattgtccataacgctatcagtattttggtcaaagccattcaacaagactctaggaagttccaaactttcccacattttcatgtcttctgagccctccaagtctctaggaagctccaaactttcccacattttcctatcttcttcagagccctccaaactgtttcaacctctgcctgttactcagttccaaagttgcctccacatctgtgggtatctttacagtagcaccctactcctggtaccaatttacagtattaatcagggttctctagaggaacagaactaataggatagatgtatatatgaaggagagtttattaaggagcattgactcagacaatcacaaggtgaagtcccacaataggctatctgcaagctgaggatcaaggaagccagtctgagttccaaaatctcaaaagtagggaagctaacagtacagccttcagtctgttgccaaaggcctgagagcccctggctgaccactggtgtaagtccaagagtccaaaagctgaagaactttgagtctgatgttcaagggcaggaagcatccagcatgggagaaagataaaggctggaagactcagcaaggcaagtccttccagcttcttcctgccttattctagccatgctggcagctgactagatggcgcccactcagattgaaggttggtctgcctctcccagtccactgactcaaatgttaatctcctttggcaacaccttgacacacatacccaggaacaatactttgcatccttcaatccgatcaagttgacactcaatattaaccatcatgcctgctgttcttgcatatggtgttccagcactcattcctcaattttctagtgatagagcccaatgtctcctttttgtggcccactgctcttctactcttagtccatggactttgtctatgctaatcacactgcctaggtccagtgatgagtgtgtgatccagcctgacccatcagcatagttcaacctagctccagttgttggtttaggaatgagcatctgacaccagtgggataaattcaatcaatgacaaggctcttaatgtaattattagggaagtgtcactgtctttctcgtgtggaaactgctgcagtgaagtgctagcccgcagctgccagcagcaacctctgtcttctcatgagcagagcctgagaatgaagccaacacagaggataccagacccaagagatggagagggacatttgagcccctaaatctagatctgcctggatgcttcaatctttgcaccaatacatttcctttctctcaaaccactttgagttgtgttttcattgccagagatggaaagaatcctgactaatgtacatacagaggtgaatgagttccatgcctaaatgcttgactggagattgatcctggaccattacactcatggagaactgtgagctctgttaaaactcttcaaaagtttcctgttgctgtcaggatataacctcaactccttaaccatggttttagagccttcaatgatcaggaccttgctgatctctggcctcatcctgaagcacttttcctcccaatttatattctggccacactggattttcagtttctagaatgtaccattgtctcctgcttctggaatttgtcctcttccttgagcatgcttcacctacctaagtcctacgattccttcaatatcagcttaaaactcaccccatcactgccagggctccacagcagttccaccttctaacactcagcacacttgcagccaggcgttcaatgcctgcccctatcccagaatataaggccccgcgagagtcagatccgtgctgctctaatctccacgctatcactaggacatgaatagagacccaacaaataaatatttgttgaatacctgaatgagataaataatgcaggcaaccctaagtacgtggaagtggaggagatctaaattagggctgagatctgtgggtcagccagctaggcatgagatgatcaacgcccaggccaaggtggtaactttagtaagagaaaggcacagggaagggaaaggaaggaaaatctatgtggaaactgagaacagaagaaccaaaataatttgaccggctttgaccaaagctagaaaaagaatctttaaagagacacccaagcccatgaaccaagtgcataagaggaatgtgcagctattggcaggggcagggtcactgcttcaggacacagttatgctgcttatgtaggacaaagcctcagcattttgcaggacccagcagggataacaggggcagaagataggcccttaacaggtggatcctgaacaggtccatcacagttggtggttggaggctagaatagagcagagagcttagcccgagcttatgtccctgggaattgagagagtatcatgggaaattctgccctccaactccacctggctgaagctgagctgcatagtaatgggtgctcctcaaacaaggtgcctgcatcgtcctcacaggggcagccaaagaggtgtttactgtttggattttctctccagagcagacttgctgttctgggaagatcacggagtgatttgcataattgccttctcaggtgatgattgctcagaccaaggaagaatttcaaaaagcccacctgcttgccttgctgggtagcataagggacatatttgggagggaaaaaaaagtcaaccaaagggagtcaggtagccctggctgccccttcaggcaggaaggtgtcaaggaagctcagaacccaacattgctctccacagttgctttccaacctccatctccactttccaaactgtagccctgggaagaagtaagaacaagctggggagaagccaactcaggaagctacctaacacctacaaatccttcaatatcagcgtaaaactcacatcaccaaggaggaattcctcggttccagatgaggccggcctttcattctgaggacctcacggcagttccttcttctaacactccgcacacttgccgccatgtgttcaatgccttctcccaccccagaatgcaagcccatgaacaagtccagttctgtgggcctgccaaacaccaactgagattctaccatttgctagtgaaagagaccaagggccccacagtcaaatgaggatggaggcacagaaataaaacatgggaaaataagtagtagtaaacatagggttctttggaacatggaggaggagctttgaggccagctgaggcaggggtgtgtatcaacaaagccctcctgggggaggtgacatcggaatagagtcttgaaagagtatagtgcctggtacatagtagatgctctaatacccaaggatgaatgacccaatggcaggatggatggggaggcagatgttccaggaaaagaaaaagctggctcagtccgttcttcatcccagagccacagtgaattctgaagctattctaatgccttgtaaactgcacaacattttccatggtgtgtagaatgtgggatgtctcttctgttatcatttcgggtcaggaatgaagtgctcatgttcgcttgtactgggggctactgagtcagaataaccaaggctcagctgactccacctcaaatcaacaggatgctctttaagtatgtgagagattcaccgggccactgcctgcactgtctagttttcttcgaagtgcctatgaaaaatgtgcttaatattcatgctccattccaaagaggcacagatgggggccaaagaggaaaaaaccatttttagtaaaaaatgactagtgtcatgtctcccagcccaaactaatatatttcttgaggctgaccttaagctacctcctacaggaagccttcctcaacaactacagattctgcatcccccttccttcctaagttcttttcacttcactccttgccacatctctacttggggtgtcagctattttgttgttcactgaatgtgtgcacatcttgtggtctctccacctcccaggttcccggaaacatatgtaagaggagctcagttttaaggataagaacattgagatctagagaggtgtacagcacccacttgccccagggttgcacagctcataactgcaggagtcaggcttccaacctggactggtgcccagactctgctcccaactacacttctaccaaccctcttcccatctcgcagcctccccatctcatttctagtccactgctctctacgttgcatcgctgttttctgggtgcatcaggtcccattgtcttgcctcctgaagaatagggtgagtggcttaggagcacagaaccaagtattcacattttcgtttctgccccatgctatttccccatttctggacgcagagtaggtgctgataatatgaagcacagagagaaaaatgtcagcacaaaaaggaagcatctgttcttgagctttcattactcagatgagaaaactgaagctcagagaggggaagtaacttaaatatgcattggacagaaccgagaagaaagcaggctggctcctgccactgtacttcacacataacaggtgcttaaattatgttattgttatattatatattatgtatattccatataatatataataatatgcataatatatatcaccatcattgtcataattttattgttgtctgaatgagacctttaaactcagtatgtcttgtcagtggggagttcggagagttttcacaaacatgagtctttagttcatggagcaaatcagaaggactgaggtgactgactttcaggaaaacaaaggccaacagaaagatgagaagacattcttacatttgtaaagtattttacagctgacaactttcttaaaagaaagattgctaaatttggcattaggaaatctgggactgagaccctttctgccactggatgaccttgacaaagtcatttgttttctttgagcttcagtctcctttgtaagatagaactgtgggatgcactcagaaaagaaaattatggagcatacagggcccaactccccattgctgtgctcatggcagccatcactaattggttaccacactctttgtgctatgcccaggtgaggcttcagaatctgtccctggaaaccactacccattggctggcatgaacgtgttagatgaaaccaatttgtcagtttcagtagatgcctgtacagccaactccagcttcgactttctgactccacgagtctatcacacatacagcaacctgaccaggttagcagagcagggctcacccctctcccccagaggaacaatctgagctcagaccagctcaagtttagatagttggtgaatggtgatggaatcagacactagacctctctaaattggcctggcaagaacactcagtagtcttacatattccctggctacaaaggactcccagtccctcagagtcaaggaccatggtaaaatgaggaaataaccaaaagcttcattctccctttcacaccacaaggtggctgagtgagaacctcccttctggacaggtgataccacgctgcaaaaccaggaagtaggtgaacttgctgatttctttcactttcatccttgtgtcattagaagcccagttcctcttgacagtatctcccaaccaccaccccctctgctgctacaccccatctggccacatatccctcagattgttgccagaactttcttatttcatttgaaagggaagtttgttgataatagcttagagtgagacctcactccattgaaggcagccgcctgcggtggtgggaagagaactgaggctggagtcagaacataggcttcttgtcctgctgctgtggccttggggaaagttgctgttcttctcttgacctcagtttcgcttccagcctatgatttccaagagagaaatgttgaattcttggctaacaggacaaagtgctcacggacctcatccctacactggtggctgggtgagtgttaggggaacagggagttccaagagcctctgaatcccactttccatactccttttaaaatccatttagtggccaacattctatggggccgtgaaaaatgagaaagaggaaaggaagggagacggctcttattgaatgcctatcatatgtcaaacatgtccatgtactagctaatgggaaaagtgctgatattccactttatagatgagcaaatcaaggttcagaggggttaagcgacttgcctcagatcaaacagctggtaaatggcagagctaggatttatattgaatactgctgattctaaagctcctgccctttatattccactgtggattttttttctttttctaattacatagtatgaagcatggagaataaacatgaagccacaccttgcagggttcccagcctatcaaaaaggtaagccagcctcctgaataattgtaatataaagccaagcatgaaaggatgggtataatccaagagtcacagatgagaacagacttcatgaggaagtggcatcttttcaggttgttccggcctcccatacaacaatgacaacaataagcaatgagagtaatgatgaacacttatctgtactagctcccttgctcgtgaaataggtactctttttctttccattttaaagaggaggaaagcaagacacagagaggccaagtaacatatcatagatcacaaggcttggaagtgacggagcctggatcaattcccaggcagattggctccagcatgcacactcttgatgaacctcactctgctgcttcttgtagtattttctcaccttgaccaccacctggggaagtagcaggagatctggggaatcctgtgagagcatttaggctaccttcctttcatgccagggaagggactagcccaaggggagcagtggcttggaggaatagagctcagctcctctcctcccagctcagaccacttgcctatgctctcctcctcctctgcaatgctggaaagatgccagcctgccaaggccttcactatgcaggctctgcatagagaagaagaacccaagcccctgtacatgggctattgttcaaggcattttagtaacatgaagatagcaaattacccacaatgaacaattctgtagaacaaggtgttccctggtctccatctgagtacctgtgcggatggtattgttagcaggtatacaggagaggagccaagctttgtgaaagggagctcttttgggtgatttgtcctgcctgtcttgcttttgctaaataatgaggatagcatgggctttggaaggaggcaggcgtgagttggaattccaccatgtcattctgtagctgtgtgaccttgggtaaattacctaacgtctctgagcatcccatccaaaaatggaaatatcactattccatggagaatcctatgaggattaaaaggagataatgtatgtaaagtagcttatataataccacattcattctgaaaacaaacatatccgaaccgccataaaaactggtaacatcatagaatgtaactcactaaaaagatccaagaatcaggaattaaagcaagaagaggattacactgtgttgttcactaaccacacacctgatagtatgagaagtagttctcactttaccctttcatcaacactgtgggtcggatgacactgtacccattttacagatgaagagattaaggatcatagagggtcaagatcttctgcaggaatgctgcttctttgactccttctgttctcagatcagttcaaagctctcagcttcacttgctaattttatacagagttgatttccggctctgttttatccttagcttccgcaatctggaaatgtgctttgcactgataattttatctattctggtacatcagtcgtttccatacaggtctccatgaccccccgcacccaccccagtcttcctcctagcccaaatgtgggccctgctcccctgtttctagtgtcctgttttatatccatccacagtggtcccagtgacacctcacactctatgtcgccaaaagcaactcgctccaccccaactctccttttcctggttctctgagtttacgcatagcacctctcttcagtgacccaggaaggatttctttggtgtctctatttatttatttacttttcccacaatactcatattcaggcagtaccctctcttcagcacccaccccccaaccaccattccctattacccacctaatgttctgattagaattctttttttctgagagagagagagggtcttgcactgtggtctaggctggagtacagtggtacagtctcagctcactgcagcctgaacctcccaggctaaagcaatctttccacctcagcctcccaagtagctagaactataggcatgcactaccatgcatggctaacttttgtattttttgaaagacgtggtttctccacatagcccagactaatcttgaactccgaaactcaagcaatccacccccctcagcctcccaaagtgccaggattacaggtataagccatcacgcctggcctgattcgaattcttaaacacaactttgaaggtggctcaaaagtcttcagttacaccccactgttaccttataaagtcctaactatagcttgccattggagacaccatgaaattccatcttaatctatttctccctctaatatacgccatagcaaaatgggtaacactgctctcgacagtatatctgatgctcaattagtagtagtaataaaggctgccagtgtcagaagcacttgacatgcagtgtctcattaattcctcaccacacccctgtgagtagacaagatgtgacaagatgtgtagttgcacagggccctgtgctcagaaggctgtgctcccatgcctggtttaatgctctgctctcactgtgtggaaattgttaaagctttttcaactcggggcctcacattgtcattctgttcagggccctgcaaactatgtagccagtcctggaagcagctgctattattacccccattttacagatgtgaaaaccaaggccacacaactaatgagcccaagactcttgtcaatacccgtattgtgccaagggtggcagacccacactctgggcttactgtgtgccatctactgtgctccctcccttcctccacatccccatgttgccagagcgagtggcatttcctgtccttgaggttaaatgactttctcacaagtttgcctgacttcaagcccagtgcccttcctgctacactgatccaaataaaacggtgcctgccccccaacccccaattccaaagccaggcctggtgtctggcgagacctgaacagggggcagaatctctgcggagacctctaaaaataaagcccgcctgcaactgtgttctgagacctgaagcttccttcttcctcttaaaagctgttcccatctctgaaagcagcttctcaccatgggctgtggctgctgcttttcccgcactgcaagggagaaacggaacagattgcaggagcaattaaaccatcacatggaaagcccagagagattggggagaggggaggagatgctgtttcttaatggcctgcctctatatttagcctgaaatacctcaatctctgacccttccagggagcaggtagaggtgagagtgaagttgggggcttcagctccgttgggcttctgggtcaggaagcgcccatctgccagtgtgcggccccattaccgccatgccttacagggactcaccatatggcaggacaggaaaccccaatcatcaaacaagcagtgaaaccacagcacagcctgtctaggtggaatttggcaagatgactcagcaaagatgtcaagtcaacaacagggagctggcctgccccacaggatgccaacttccccaaggggacagggggcttgtgacaggtggtgaagggtggtcagcctttagtttcagccccagttacagaagagcctccattcctctcccttgctgcatcctgagtcagacaatgtgtgtggggcggatggcagtgagttttaaaaaaacacagaggcccgggcccagtgctaaagacagtaattgattctggagtggggttcagacgtctgtatttgcataagactctccaggtaattacaagcatggcccgttgagaaacaaccagtagtaagattaggcataagatgcatttgactttatattctagttttggtccctcgcttcttgggggactttgaagaagtgtatgtttatctcagagcctcagtttccccttctctatatgagtatgaaattctcaatttctggtacatagccaatgctcagtaaatgttgtgggctgacaaaatgaatgaatgaatggaggatgtaagcaaatgagtaaacacataacctagcacagacgatgttggttcctgcaggcacaaggatatggctgcttctcttgggctgggctgtctcacaagcaggctcagtcacaaggaatgaagtagtctatctgcaaggtggtcccaagtgacatcagcagaggatctggggaacaagaaaggggaaggcaggaagcaatgcagggtgcattaatgagcccattactattgtggacaattgaggctccgtcccactggggtctctgggcgacaatgtgaacatgctgcagagttgtctcacccgagggacgggagctgtacctattctccagctcccatcatcaatgacagagggccattcctgggggcaggaactccagggcacttctgctctgtcctgcttgtgggctgagaaaaagccctggggcagagaagtggagagtcccaggtgcttgttgtagaatgtcatcggcagctactgccatggtgagtgccaaggggatacaggtgaggcaccaacagcacctgcctcgctaggcctccgatatgtaactttccactctgggctaggggtctgggggaagagggaaaggaaaggcccactcatggtccaagctgtcttacaccacacagctgccggtaccattaggatctagcaatgcaaagtcttgtttatctcaacgtgcctatttcctcggcagttctgaggctagcagtgtttctcagtctctgaactattgacattttgggctcattaattctttgttgtagggagctgctctgtggattgtaggatgctaagcagcgtccctggcctctacccactagatgccagtagcacctttcattatgacaacaaaacttgtttccagacattatcaaatgtcccctgggtggcaaagttgcccccaggtgagaaccagtggggtagttggatacctttcctcattctcgaagcccaggcagcaccccacttaaacttctggagctgtggatgcatcttgaccaggccacgctctccttggtctctgcctagtgggatgctgcacttggaacacatcccagagacaggcagtgcccacacccagctgtgaaacacactgctcccctgctgagccaagccctgatctatgggcagaggaagttaagcagcagccgtggcatcacagttggactatgggaaccgcaaaagacagggaagttaggcagctttggctccagcggcctccactccaacctgggtcccagaggccaaggaggaggatttatcagaccagcccctaacacagacccagggagatttaaggctaactcaacaaggagtttttgtgaagagttgtaagcactcattgaggctatgcaattatcctaagaaatgcggtgagcacacgcagagccagcagggaaaggtgtccaggctgactccaaactacttgctttcatcattaaccctggtggcatctggtgaaaggtgggggtgaagtgggggctgagaaatcttcccccaacaggcaaggggagatgctcagaacaaacccaggtgtctgagtcactcgtgctgacagcagattcatcgcccttcagtcctgcaaaagaggtagccagcctgcctttgctatacctatcatccatcaaatctgagaagccaaacttgggcgtaacagggttgcatttctcctctgggctgcttcctccactcccatttctttatgcttccctccaggatgcgtgtgcaatgcgcacaccactcaaagggcacacagtggcacgcagtcctccagcagaaatgattcacagccaaatacagaagccggctgagcacagaatccaaagacagtggggctccaagccggctgtgctagcggcacaccagctctcctgccttcgtttcctgggttgtcagtgcagtagcctacctggtcaaaacacgataaaacaccaagcagaagcagagaaacctctgttctctggcctggcccctgctgcaaccttcagaaggcttgagagaatatttggcacctggagaagagcaacggcaagtctaaaggcaaccaggagaacatttcacacatatgcacacacacaaatgcatacacaaacatacgctcacacaccagctcctgaaagtgacagtttgtgaatccctgtccctgccctcccattcatgcataatgaacattcctctgaagagaagagaggtggggaagaagcaagggatgacttttgctggaatgaactctttggaaatgcaagattgtgtcaggacatgcccatatacatgtaaggacacacaaacacagaattagaacattttctacctacgaatctacctatttcatctgtatttgtgaaaaaaaaattataacccaaaaagattaagaggctttgataagattatacagagctgggactcaaacttggatcttcagacccagaccttgtgatggatttagaacaatctgcatccatgatttaattgggagagggacaagggattgaaattcttggcctgtcttcctgtaaatagaagctgtgattctgttgacattagtaataattcttccccgagactgagaaaaacaacagaagtaataataataaccaccaggctcagcgttcttacagttactaagtgctttcccatttgtaacctcaggcgattttcccaacaatgcgggatgggggattaatggtatcaccacctcctccttacagataaagaaacaaagtcttcaaaggttgaataatgttgggaacaactataaactatagactaataaatgttaagttaatattatcaatgtcatcaacattatacaccttacttaccaaacatgtcacatgatgtcttaaggatggagagtcatgccttgtccatgtatgaatcccccaaaggtcccaaaagagaacttgatgtacagtaggtgaccaatatacatttgacgattgatttagttactgaatgcatgacaggaaggacgatagaaaaatactcacatccagtctctctgtgggctctaaactctaaaagagtagtttctgtttctttaaaaacaaaacaaacaaaggtcagtattgcccagagctccagtgatctctaggcttagattaatggtccgctagttctttgcgtaggactggtccagctatgtggtttctgactatacagcatgctttaaggagcatcaagaagcattctctgtttggaaaaacaaaacaaaacaaaaaaatccaaaaatcctttattgcttgaaatttgcaccttccactccctcaagctaaggtgtgaaaagctcaattagttgtctgtgatcacacatcacgccttactaaggattagtttataagactagctcctgccacatggctaatcctcaaaaagagaacacagaacaggtcacttttgatgaagaataagcgtgttaacacaagctttaggtctcataacacactgtggggacttgggccccgtcgcagacaatgaaagagtcccagccagccagcactggagaaaaggagactgcaaatgcagacaaaccttgccaagcttcctccctctctgggtcacagtttccttctgtgcaaatcagagactgagactgaaagagggatgtgctgacagaactaacccaggtcaggtggtcagcaccagagttatgcctagggccagccctgaatgtggcacacccacagtgagggaatctctacccaaagaggggatgatctgaatctctgcatcatctcttgggcttggctgctagagtttctgggctggaagcaggagcagaaaccttctccacagagactgaggtggaacacacagagctcagctctgagttgtagtccaaatcccagaagctaccaaagggccaagggttattcagctgaagggatcagaagcagatgctaggagccaaggatttaggatctagggagagcagccagcacaacccagtggagacatcaacagaggggctgtggttcctagcttcccattcaggtgcaggcggaggcaagctgccattgttgggggcgggtggagaggatagaagctgtgcttaaagagccctggcagaatggccaaaccatgcttcctcctgtagcaataggcccagacttgggcaattgagtgcttttctcactgcccagcagggcagggatgcaaattccagagtgaagattgggtaggcaggagcgctctaactttcaattacagtgtcacaccaaatggaactccgcagctctctctctactctggggtgtatttgactttgaatcaagcgacctcctgaacatatagacacagagaggagtggcttgttcctgctcactcaccccaccaggctgccatgggacataagccacagcccatcgtttacacacaggcttattaaagcaaataggatttggcctagattgcaaacaggttctcctctgggtaagcgtatttgctgtgatccttggggtgtttcctgtggagcacaggacacccaaacagggcctgcttggttgccctgggcctcagggatgccttgccagtcccactccccttaccccaggagagctcgaaacatttgcttaagacatctccatgcatcatcctcccacctggtccaggggaaggaaagttctgattttccaccttctactctgtcctccaaaatttcctgcctttttccgtccactaatccccattcactcagtcttcttcccggcttcagtttcttcagctgggaaatgggacgattctgtgagatgctttcttaggttttttttttctcctcaaacctcctgtgctctctggaagctctgggaagtggaaagcagtctggcttgcaagtcaggagccctgcagtctattaccaaacttcccctttcctgaataggtgaccatgagtaattccctcccaattcccaagtctcagtgtcttcagctacaacgttaaggaagcagatttaaagatctctgagctcacttctctttggtgtcttactccagcagccattgtgcttatgtgtgtgtatgtatgtgtgtacaacctcagctggctttgcctgcctggcaccccagccctatccctggatttttccttgggcagtcaccctccatctggcggcatgcagtctcagtggtggtatccatcaaggtatgctgcccggcaggtggacaggagacttaggcaagtccagccagcttctcttttcctagacactgacctgaattgagtgctgttaggtgataggaacctatctatccatccatccatccatccatccatccatccatccatccatagagccctgccacaaagacagtgcccatgaattcctccatcctagatactcagaggttcctgattcctctcttttgtgaggccacacctattttagccttagttctgattttgtggattgcccagtatccatccattcacatctgtgtctaagtcctacaagtctactcgaatgtcatcttttaaatgatgccttccctggtttccctatataaacttgcagccccaccctcatccctcagcttttcctgtcttcctctcctgcttcaattttctccatagtactttatcatgttttaacaattgtatcatctaatttacttatttatgtggtgtgttggccatctctccccactagaatgtaagttccctgaggccagacatttgtgtctgctttattcattggtatattgccagtgctcaggatagtgtctgacacgtggcaggcactcactaaatatttgttgaatgaatgaatgtatgaaatcatgcttgaaagttgacctcagttggttttggccactaatcctaattgagaccgtctcctgttcttccctgtggatcctttctccctccccaggatggaagcccctttgctgatatgggatggcaaagcctgaacagaagcagggatcagagcccaaataaagggttgggcctcctgaggtggaggcccagtctagtcctcttccaggggaagatggctcaatcttcgccctctatcttcctctctccccctttcaaccccttgtcctagacccacctctgcaatctgaaccactttcatttaaggaaacccaaagtcatgatctgttttctaggaaagtcagagccaaagacatgaacagaaaagaaaaaaaatgctgacaagtctcagtgggccaggacctgaaaatcaatttgacacatcaattttttggatttaataactcatgctcccatggaatcaaggtcataaatagtaaagagagttccaggcaagcctaccaaaatctgtttgactcggctggagaccttgatctcatctctctgttctggtcccatcaataatttcctctcctagatgcttcctctctttggtttggctcccacatcattgccctgtcaatgatgtttgcctacatttctgtctcttccttctgtgcacctcacctcttctttccctgttcattgaatgaagtcatcccacaaggctctgttctttgctgtctgggcttctcagcctacatttaatcctcaggaatgtaagtctctccttttacggtaccatgttgaagatttccccaaattcttctcagtacccccaaaatctctaatcactggatggcctcctcaactggaaatctggcttatcctttgcctatcttcagacctcccctttttaaacttctctgccctcaaattggatggacgctcttggatcatctgctcgaatgtcacgttttcaatgaagccttccctggtctccttatatattaataccccatttacagatgatcttggatcatttacagatccaagatcatctgtaaatggggtattaatccctttctcaaataactgttgagtgagtttaacaatatgattcatctaaaggtgctttgaaatggtacgagtgttacttggtctaattcagtctcagacttctggttgtggaatgcctgccctttatttccatagtctcatatagtgagtccagctgtacactcagggacttgtgtccccatctccacaataacctgcccaggcctgaccccacattccaactctggattttcatcgtgcatggactccttgtatgagcccagcctagttttccaactcacctgtgctccaccctcccaattgctctcttccaactggagagcccacgtgggcccaaggaaggcagggaggaaagtgacattgttgagccctgtgcccggtgaagtacgcatgtgagctcatccaatctgcagccactccaggaggagggcatcattatcctcaataaacagatgagcaaacagaggctcatggagggtcagcgacgtgtccaaggtcactgactcatcagaaggctactttgttctcactccatcaggtggcccaaggagaaaggtaagacagaaagaggaagccactaggacaaacttgttcctgctgtgatacccttaaacatcaaatcatgagattaggtcgtcctgggggtgggtgtgggcaggggagggaaaagtggctataccgaagcaaggatggagggaggagggtgcctgtgatcagccatgctaattttgacattttcctgtgcgtctgcttgtcatcatcaacttataatttaacctcgttgtggcgatgcctctggaatgtcaacaaggcttgctggaatttcattacagccaggcagctggcccctggtatttctgatacaaatgatgtgcagctgcattctggccctgctgtctttatcccccatctagcaaatggcagcattaggcacacttaatccggagagatattccctacaccgagaagagggctcgtcaattccaccgggggcatttcctatggactgctctgcctgagccaattaaactaaagtaattgctgaaaagcaatggatattgatgatggatacagggggctgaccacaggggtagttggagggaaagtgctgaataatgaaacctccccatatctgcacagcatttgccactttcagggcacctctgcctgcatcgtggcagtggttcagtgatctgtgctgggaggttgtggcattcccattttgcaaaagtgaacatcaaagctcagaggaaaaaatgatttcaagttaaccagaattaggaaacagaaatctgggtacacaaagtgcacgtctagatttcacatttatccaacaaatatttattgagcacctactgttagccaggccttgtgcttgtttgaaggatacagtttttctatcctcgataaccatggcatttttctgtaggattttcctttcaggccctctcctaagagagatctttcccaatcccctacatcctataccgtttactttccccttccctctggccccaaagagaaggttttgatgtctgtcgattctacctgagtatacgtaggtttccttttctgtccctcccaacagaagcctcatgacactgattgttcccagggacagagaaggcctgccctgttacaggactcctgcaccctgtgagcagactggagaggaatttggggccagcggtcttgttggccctgaaagcacggtgtctgcagctgcctgcctggcacatgggttcaagcagccttgccagctcatggcatcatggtgcagtatggaggtcccgggccatggtttcagtgctgtctatgactcatgggctgtggagtcctggtgccagcccttgaaggtggggcaggaaagtgaggcacatgagtgaattcatagctgagaccacgccagacctggatctttcccaggtttgaaggttgaatgtgcctgtgctggccagggcttggtgagcttctccactggatggtaaaccccactcagtgtcttccctattatcacactcaggccctagctgctagaagcctcatttgcctaagtttttgtcccaatgtttccgtgaaggcagagagaggagctatttgcatgccagcccagggctacgtagaaaatatggcagggatcctctcacactgcagtcgagtcaaggcagtccagggtggctgctggggccagactgccccgtcaagatccagcctgcctttcactgactgtgtgattagaatgtcttgccctatccctggactttagtttctgcaacttcaaaatgaggacaagataacctccaaggtccaggttactttcctatacagagtctggaactgtgcctgcccgcatagtgcacactcacagccagctaaaggatggtgtgcctggggtgggtctgcagggcaagccctatttcatagtttaacatttctgacaccacctgtgtcaaattcctatgcttacggtgtgctgggagagtcgagtcaaggccagactgagggtgactctggccctctgtgctaggcctactgtctgcagatgcctccaaccctgccttggacagagggaggagtaaggagtgttaggaagggcctggggtgtcaaagagcttctaaccccaccagtgagtcctggtgcctatggagggagagcgaggagggcttctaaacatgggtcatagataaaaccaaaacagaataaacacacttggggggcttacaggagaaacattatcacaaaagggctgagtgtaagtacagaaggggacaggacaggcttattgtgtctcctcggtgacagatccaaccagagtcagtttacagactacatgtaaggtgtcgggcagtcaacccccagctggttccagggccttggtccctcccagcagctgtcttccccaagtctatgactcatgaccaggagagaggagggtgggcagtgagttgcatgaaggcaagacaccctctaaagcctggacccaggccatgacaccaatccatcagagccgtgaccttggcctggcgttgtcttgggggcacaagagtgaccattcacactacctgcctctatccgtccttccttcctgcatgagacctggtatagctgctgctccatgcctaccactgggtcatagagattcagagtctccctggggcagttgccagggagtgaggccgtcagaaaccctgacttctcccctccacccagccgagctccaccaagcccaggagtggctctcccggagcctggtgtcccctgtatgcacagagtactttaagaaatccagaaaagtcatcacccccaggaatccacactgaatgtgagccagcatcagccctctctgcactcgacctcctcaggtaccaagatgggttatatttggggtaagaggggacagaaaggcctcatgtgtcaggaaaaagttacaaaatcccacccctcatacaagaactctcactttttccccttcttagcattctgcagagctagagtgaaccatgttggccattgtgaaagtacaaattcaggaatgctgaggtcattactcaaggtgacatcacttataagtggccagcccttgacctacaaggtctaaatcacatttctatcttcacacttagaggtctcaatttctgcttacacaccttcaataatgaagaactcgggaactcagtctctcttgaatggaactccacatagaagagtctcaagtggtccaaagtaactagacttctctctgtgccccttaggcctcctctcttctttctctactggacacagcaacagcaagtatccgagtcacttagtattcctggtattctgagctgggctccagctggggtgagccttgtagattctcagacagcagcatcaaggaatgtgggcttcaagccaagtcagataataggaaaataataataataataaagatagagacacaaacacaaggacactgggacaagcataagcggttagatccacaaacagagacaaataggtgctgggagcatggtggaaggacacacctccactgacagccacatattttcaggactcaagagcccaaggacagacagagctcaagcaagtctctgagtgagggaggtgagaagccggatgagggctggcctttgtgtctccatctctaccacttgaccaggatcaaagaacttccccagatgagcttagacacttagacatctagaaatgactcagtgggcgagaagaaagggagactaggaagtgaaagaatgaagtgaaagaagtgaaagaatgggccacaacacatatggagatgggatggcaggggaaaggatgagaatcttgggaatgggaagaagttttctgggaacttgggtaggttgaggcaacaggttgtggtggatgctgtgatgtgcttcccaggtccctcttcaagaaggaaggatttatcctgctacctgctggggatgctgcctgcagaaagttctcagctgccagctccccatggggtttgccctaaccctgactgcagagagctgccttgctccagatcatgccttctttacagggtggttcacatccaatgattgatccatggaaagacattgaggcctgagcccctttccccagtctggaacaactctgaaggctcattccatttcacatttcccatggcatcaggtaagatgctcattgagactgcatcacagctcagcttctccctctgtctaatcctgctttctccccatcccttcctcaagtgtaatttttttttttttagacagaatcttgctctgtcaccaggctggagtgcaatggcacaatctcagctcactgcaacctctgcctcctgggttcaagcaactccactgcctcagcctcccaagtagctgagaccacaggcgtgcacaatctcgcctggctaattttttttctttcattttttttgtattttagtagagacggggtttcaccatgttggccaggatgatctccatctcctgacctagtgatccacctgcctcggcctcccaaagtgctgggattacgggcgtgagccaccgcacccagccctcaagtgtaattttatgagttcttcctaataaaccattgcaagtaaatatctatctcagagtctccttcctggggacccagtctgtgacacaggcttaaactctgagcaggaagttttcattttgcctggcccacagtttacaaaaacattgatgactgcgatctcacttgatcttcacaatgatttggtgaagtgggtggtactgttcttacttaacacacgaggaaactgaggcttgaagttcaatggctgttcgaagaccaaaacagcaaggaattggtggaaccaggacttaaaccctggtcttttgggctctcaaatgtatgttctttcctctcttgcacagtttctaaagaaaagaaagaaggaagggagagagaaaggaagggagggtggaaagggggaaagaggagaagaaagaaggaaggaaggaaggaaagaagggagggggggaagattagctaacatctagcacttattctgagctaagcaccatgcttaacattctacatgcattatcttatttaatcctcacaattttatgacatatgtattatttgtatccctatgttatagatgaggaatttgaggcccagagaattgcaacattatctaaggtcacatagccttgtatgaggaagtggcttgatacaaactcacttccgtctgattccaggccaggcatcttaaccactactatcagggagaattggcaccaaccggaaggttgaggagcctcaagaagcagttgtgggctagagtattggggaatccagagcagctaactaagatgctaagcacctgagtaaatgggaagcttagacagatctgcatccttgttctcctgggagcagactgggcctgctttggggctgagccagttcatgcctggagccattgcttggaaattgcacccagccaatccccagccgtaattaccactaggcttgcagcactgggctgagagctggaaatagctctgtatttatttaccctgcaattacatgctacattaaatgctctgcaagaacatggcgatcaccctgcaattaactggtccctgcttcctgggcaagagaaggctggagacagttactggctggaatcaagtgctccctggtttcttaatgggcctggggtcaccttgtaacttatgctggtgggcctggccagaggctgcagctccaagtgggagcttctttagctcctgaaggagacagattaacatctgagtcagatctgagtccagcgttgctatgggttctgtgacaagatcgtccattagtgggtccttgtccatattgtcttctctagctcctcccaaggcatctagtgtctctctgtattttatttttggagttcctgaattctaccagcctttgcataggtcgtttcctatcatgttgacctggtaaattcctatctacctttgaagattcagctcaactatcatctcctctgggaagcatgctttgaaaggagattgtataggaaagtgaaaatcagacatactcgtgacaaaataccagcttcattacttgatagctatgtgactttgagcaacttacttggcctctctgaacctcaatatatgtgtgtatgtgtacatgggtgtatagaactccctgatatcatatgcttatacacattatgtgtatacatatacaagaactcaaagtcttctagttagggacagattttagcaaggtggaaacagcatggtgcctcacacacagtaggtgtgcaccaaatctttgttgaatcaatgagtcagtgagtaaatcaaccatcaatcaaaagaaaccaattaggagctgtgagtgtgtgtgtacccatgtttatctttgtggctgtccacttaacttgctgcatataaacaagtataccagttactcaaaaacataatatgtgcacatgatggtaattggtctctagttgcctggagatttcagagaacttgttcccaggctgtgtggatagactaagaatgccaggaaaaagcactaagaaaagagttaattatatatttactacctctgtcattttctcctaattatgtcttggcaagcagtgtctcctggatgagtcttaatctcagtgtctttaaaaatataataataaatcaatgtgagatgaaatgctcccaacagccaaaatgcaccagacagtttccaatcagtgagagcaccagtgaacagttctggacccagtttcgatgacgtttgggcctcaggtaccagatatggagccagaaaaacagtcagagagcagagcagtgtctagaacgtgtcactgaggcctcttctcagtcttctgagggtcacctggaatccctatggcctctgcctgctgccaatgtaccatgaggcaacagaggaggaagttaggcgtgcaaattcgtgagccaccctggtgcattttgcttggtttctggactgagaagacagggcccatttactcagccctctgtatgtcagcggctctcaactgggggcagttctatcctcctagcagtcatttgtacaagtctggagttattttcagtggttaccacctggggattttgctactggcatccaatgggtagaggccaggggtgctgctgaacattctacaatgcacaggatactcccacccacagcaaagaattatctggcttaaaatgccagtaatgcccaggttgagaagccctctgtttgtgctggcaagcttgggccctggcagcatgtgtccatgctgtctgttcttgttgtcactagttctggttttcagaccttttcatgctcttttctattttggtttctaacaagggacacaggcacacacatgctcagaacaaatgcacagccttccttccccataacccctttctggctgcaatcatattcactgaggattagtcagccctctccaatggaggggagtggacactcaccttgacatcctgtgggcgcctgcagatgctggctctttctctcctcccagggataagaccgcacttctctcactggtcccagtgggcatagcaaaagcaacaaagctgtggggcttgttggtgcttcatcgaacaggcctaggcaggaggcccagtgcagccctgtctatgaggtgacctgggaatctgtgtttcttatcaagtgtcaacacatatgcccagcaatttcactctgttccataccaagcaatcaaacacgcctacatcgtgcaagcaatttttaggtctcctagtttctattattagagcctcttgcctaggattaaaggcccatggcacgtaaaagggccaagaggaaatttcccaggattttctcatgtagtcctcacaaccacccgacgatgcagacacttgtgcatccccttcacaattgggggaaagaggttctaaggacagaacagtgcctttgcactgcatgagtcagatcttgtcacttgtctgtctaagctggtgctggaaataatgaagatgagatggaaacaccagtccatttgatcctaagcaaggcatgggctcttgacactatagctgttgctgaaaggagatggaggaaggagaggcaaagagaatagaaagggatgtttctgagcacaagagtggaggaaacagaaggcatggatcacctctttaaccctgacattctcctagctcataagcacatccctgtcctttaacatctgggtgtctttctagaggacaccagaaacttcagacactgaaaggaaagacattctaaaaggtggaaagaaagtggcatttggggactgctataggcagtctgaatatagatgtgagtgataaacatatggggctcattactccaagaggcccaggcttcttctaaacaggtgtcaagagaattttaattgaagcctcaagccatgatgaattattaaaggcatggagggatgtgagtaggacatttcagctcagtcagtcagctccaggaacaccttggatagaccataggcagatgagcacttgggaaatgatctatataaagtacaataaacttctctgaaaattatgcccaccccaacctccccccactcacacatacgacttctttagaatccagcatttctcaacatgtatcccatagagcagtacctcgtaactttagcgtgcatagaaactttaatgtgtcctcggagtgtccagggtgggcctgacattctgcatctctaacaagctctcaagaaatgctgatgcaaccggtctacaggccatacttgaatagagaggttttagaatactggctaagcaagatgttaatggtcttcaagggaaaagaaaagattccagaggcaaaatgtttgggacagacaacattaagtttaacgagtatctgaaccaccagggaaagagggcagagtgtaatatgcttaaggctgttaagaggctttacagaaaacaaaaggagttccatggtcaaacacttttgggaggacctgggttaagttaaaggagtatgcagaacttctcagtgcctttacactgagccagatcttgccactcctctgtctaaagctggtaatgtagaagtctttacattggctgaaaaagcccccaggacttcactccttccttctccctatgtccaggtccacaggccttccctgagaagacacaataggcatccctcagcctcagggcctttggcctgggtctttcctctgcctgaaacattctctgacagctaattgtctaactccattgccttcttcttttctcaaaggccaccttttagatgagactgctctaaccaccctatggaatttcataacccacacctcttgcccctggcatttgcaatcccccttatttgaactttcttttttcttttcttccagtgcattttcaccttcaaagacaccatacaatttcataatttattgtgtttattgcttattgtttgtcttttccattaaactgtaagctccatgagaacaggaatctggttttttttccttgcagtattatgagtacctggaacagtacctgtgctatactagatactctaaatatttgctgaatcagcaattgggcagatgtccaaagtgaagttcttagtaggagtggaatatagtaagcatcattctccaaaggcttttcactgcagaacctatttctttcttatttcttttccaacggagcatctcagcatgaccactattcctaaatacacattttctaggaaatggctgctgtagtaactcactgagaatccagccttcattcattttcctaaatccttctgggcctattcatattcatcccctgacaatcccaaagtgatgaattccataagtttattacccacagtataaatttatctttaattctgcaagaacaatgtcatgggagggacacttacttcctgctctcctgcaaagggcccctcgatgccaccacagagaagaggcatagggtttcacaccatgccttataagcatggtgctccataaattcatatttaaccctcagagtaatcctttgaggtgagtcttaatcccccattatacaaatgagaatctgggtctcagggagattaagtagcttacagagctgggatttggataaaggtctgccatgccttgaagctcatatactctccacaacaccaatgtggcaaagctcacaaaatggcatttttcaaatgccaaggtacggaatcagagacttgggagctgtgtgtctgtccagagtgtctccctcattagcagtggccatagaatagcaataatagctactgcttattgagtttttactatacaccaatcattaatctaagcattttacatgcattaaggcttttaattcctagaaccctatggacctcactttacagatgaggaagctaaggcaattaaaaagttacatagcatattaacttacccaggtcacatggctgtagagcagtacttaggccagaatcaggggaaaaaagtcaggcaaggtgcagttttgaaccaactcggctgctcccatgaccacctcactatgctctggtgctcagtgccaaatccagctccttcttccctcttaggtgcacccagtgctccacagcagtcttgccccagcctttgcatctgtctcccagcactctgatatatgagaacccttttatggatgggagtgcaatttacagacttctgtttgcaatccctagcaacactttcccacacagcttccccagatgatccatgctgggcagctagggactggcaccaagaaggcacttggagaccgtcatattcagtcacctcatttgaaatctggggaacctgagatgcagaggagatgatgacttgctgaacacacacaatcagaaataaacctggactaggacacaggcctagaaatcccattccagtatcatttaacccattagccaaccaaccaactaaccaaccaaccaaccaaccaacgaaccagaaagcatttactgaggcactgttaggtgaaagtgccaaggaatgaccagggtttctgctctaatgcccactgacttatcatttgtgttcacccatgctttcactcattcatttccttattcaataaatcattaggctcaagaaataacatgataaaaaagacaatctcttctaatgcagatgagacatattttaataaaaataacagaggtatattcagaataataaacagtaataagagcttaaagaaataaaaaatgtttaaggtcttttgacagcatgtaatttgtgagggagacaggaaggaatgtgacctagcctggaaatcaaagaaaacttcctggaagaagtggcatctggagtgagatttaaaggagagtaagagtgcattaggctagaagggattgggaggaagagcatacataagagacctgagacagaatgaatgtaacacatttagaaatataatagtgtaattgtgaatcgtataatatagtatggtgtggtatacatgcaaacacatataaaatacaaggcactttccagggaaagcaactaacatttactgaatgattgctacatgccagtccctttattacctccttgctcagtggaaggtaattgaatcacgggagcaagtctttcccatgctgttctcatgatagtgaataagtcttacaagatctgatggttttaaaagaggagttcccctgcacaagctctctctttttgcctgctgccatccatgtaagatgtgacttgctcctccttgccttccgccatgattgtgaggtctcctcggccatgtggaactgtaagtcccattaaacctctttcttttgtaaattgcccagtctttatcagcagtgtgcaaattgactaatacatcgacccttagcagatgctgctgattttcccctaagttgctcccattcctctttaccatttctgcttgcctttcctccaggggctgtatttttgttgttgttgttttggttagtttttgcctctaatctaatgacctcttcctagtgttctcctcacaggcctgccctgaagctcctagatccactttgccattgctcccagagagctatcaagacctgggagctaagttatccccctatccctggtgactcttagacagtgactggttgggagcaggaaagcccagcaaccttgcccagagcaggggcaaaagcagacatgtaatttatactctagagctctgagtcaggctgagccaaaactttgccccaaattgttcccttgcctggcttcttccacttctatgcccctcctcccaccttccacaacttccttatttatttttcctgcaatttctccttaataaatcactcagacaagaattctcactattcagaaactgactctggggaacccaacctaaaacagaacccacatctgtctgaacttgaagccctttttcttgttagtgagacatgatgttaaacagagtcacaccagtgaagggtaaaggagtaggaatgatggtaaggtcaagagctggggaaggttttttgagtttagagatgaagaagaaagcccttggggacaagaaatctcaattaagcatccaaagactggcaggttttaagctcagtggagaaagcaggcctccaggattgggaggtgtgatatcaaacagaaggacacggcaaaggtgaccgaggtgcttacacaacagagggacttggcccatctggaaatggactaatttccaggaaattggaaaagagtgcacgaaaggagatcggggccagactgccaagggtttctttggtatcaggctaaggaggcaaacaggagtggagagaatatactcttttgtggtaggcacgccttggtcccagtgccacacccaccacttcccggctaagacctttaacaggtaattcagttgactcagcagtgaaatcaaaagacctacttttgaggattagataagaatagcacaattaaaatccctagcccattaccagagactcaaatgacactgttgttttttttctcattcttgaagtttgggcttaattttgtacaaggtgtcactgcagagactttgatcaagaaaatgaaacattcaaatatagaaaactcgtattaacaggagagaaaaggacaacttaaagaggcacacaggagacctggagaccaatgagtttttgcaggaaactaagcatgaaggaactgagcccagtctagggttgcagcagtgggaagaaggggaaagaggcacttccggtgatattgacaaggacagctggtcagcccttcgtgcataattagcatgcaggagtgaaagagaggcagaagcccaagctgtctttgaggttttgacctagtgcctgaatgcaaaagaatgagagaagaagggctagcttaagggtgaaggtggggaatttgatctgatgtatgttgagcttgactttacatctggccatccagagaagcagcagtatataagtccaaagagccagacaggcctggtcacagctctgcctcttactagctgtgtgactggataaatttcaggacctctgtgtgcctccatttcctcacctgctaaaagggaaaacagatacagggttgctttaaagattgaggcatagaaaattgtctggcaacagatagatgctcaacaaatgctaactttaaaaaaaaattttaatattcatcaggcaattgggatcgagtcttggagttggcctcagagctaatattgtacatttggaaagcaaaggactagaggaaatggctgaaacataagcacagttgagatcaattaccttttggaggaaaatgtcctgtcaaagaccaacaagcactgaagataaatgttaagttagttggcttcttctgttttcccacaaggagcacaactcaatttagttgtacaaacatttacgagccagacacagtggaaatggggaccctgagatgaagaagatgtagttctttccctgaaaggctcacagtttcttggagggatggacatatagaaaaaccaagcaaagcgcaatgtgagaagaattatgcaagaggcataaagggtgcaccaaggagggagtgatgaattttgcctagaggatttggagaggaaataactgaaacactaacatctctcccacagcattaaacacaaataaaaaaatttcaaataaatgaactatgaataatcacatacacttaattattagttcaaagatgatcattcaaagacaagaaactctaacaaaacttgtaactccaaatgtttaggttattgcagtaaagagagtaggggataaagaattgcagatctggaagcatcaaattctctagcttctaactcaaacagcttctaaaccacatgggttgtagatgaagtagttaactagggctgactgctataataaaaacatcaatctggatttttatgagtttatgggtgtgaagcttggtgttgacatgtgagaagaaaaatatcttttccttattaactgagtcttgagtagccactgaaaagatgaggatgatggagtcagagaaaatattcatagattcaactaagtcaaacccctcttttgctttactgataaagagaagacatcagagaggggaagtgactcatgcaaagtcaccctgctggggagagccaggatgaagtgccagggatcctgactcccagtcaagttctctttctacactaccactgtgtcttttaaatgaacccttaaatccagattcccccaatctatcctgccaccggctacatgtgcacatacaaatactcctaaattggccccaactggcccagcacctcctctgcatggagtaagggtctgctgcatccttgatcatatcacgtaggcaggaggcttagagctaaccacatggtctggcctccaggggaccatcaaccagcaggaagaattccccaaggcaatgcactgttggctttctcaacgttccacaaaataactgcacctgatattccccaccaactaaggcaggaggctctgctaatttcattaataacttaatgagattattaaccactacccagtgggggcagatttggtttttccttggttataggaatgtatccatttttcacacaattacagcctgagaggatcatcactgaggctgacaattgtgggcttattaggagcaatttagacacaagattggatttcctttctgcccataaccttttgttcaaagcaaatgaactggtgttcctcatattagtatattaataaaggttgtccaggaggtgtttgatctttaagattggcccagtagcagagtagtaacactgccctgggaggcagggtgccaggcttctcatgccagcttcaagcagccagcccaagccacttggtgtctctgagcctcagtttctcattacctactgtgatagaactggaccggtttggtggtttgaactagagacccacaagctatccaccatactttaagataactgatggaatcatctgtattgctgatctaacgctgcatagactaagtaaaattctgatatctctccttttgggcagaattatatcttctcagtgcataataccagctagctcagcctagtcagatgctgactggctgtcgatgacatcatgggtatttggaagccattagagaaaaacaaaaggggacacctgagaaaattgatttctaaggtctgtctctcgtgagcaattcattcatcgaaactcagcttccttgaccctgccaggctgaatttacttctttccttccaacagccttcatttgggatttcagttaactgtgcacacatgtgtcttttcccaaagagtctctgcttaccttaagggtgcggggtgaattcactctatccacaagtgtgttggagctaactcacattggctcgcaaaagccaattacctgcatttcttccaaaccctgagttcagtggactctatgttggcagcttgagatcagtcatggtggggatatttataacagagaaatcggcaaacactacaaatcaggatttgtttcttcccacagcgctggttgttaaatattcaccaacacatcactgactatatccccactgccaagcatttaggatgtaataagaacgtagttgagatttgatgaataaatgaatgaccagagtcagcaaacctgggtactgacgggtttcaagcaggctgaatgctatgtatacatgagttagaaagtgtcccgagtagcttgcatgagaggtatacaactagagcagtggcttgaaaccctggctgtatgttaaaattacctggtgcccagtccacagctcaatcctgaagtcctggagtgggtattggatatcagtattttctatgcccacatgatttcatgtttgagaatcactgatctagaaaagttcctggactaatcatggccaccataacacccagcctcagtgctccagtgcccatgactgcctaccactttaattcagggagcctgaaagtcaagcagaaatataatttcattggtagattggtagcttccctgtaattaagcagtaaggttacaaggaggtactcctccccagttggtatggtttcagtttttttggcacatgtccagaatgatgatttagttaggtagccatttaagagacagcatcttgacttgtccaaaagagaacagcagcctcagcctacaagtcactggtacatgcccatgaccccactctcctctactgccatgcgcctccctgcacagccacatggctgttatttttctctctttaaaggaccagcacaaatactgcctcttctttgaagttctttgaggcttttgccagtgtgtctggctgatggctggagagatcaaggagaaacagactctgagttgaagctccagctctagaattcatagctgtgaaaatttggcaagccacttagcttctctgagccacatgttctgcctatagaaaatgaagtgggtagcacataaatggatacatctggatgtgtttggtatcatgtactggaagtgggagagaactgaactgtgatagtttagtctagtgtctgttctgccccctcagtagacattcattttggtcaagtcacattcctctctgatcctcactttcttcctcagaaaatgatggagtctggttagatgctgtggacgggctttttcagttaaaaatgaacttactgtctctgcctcttgcttggcatgtgtctgccttccacagtgactgatctttttctatatacaacctgtctttccaaccagattagggaaccccaaagagtagtgaatgtgtcttttttgcctgtgtatctccagagcccagaacagcgctccaaacttagacatgtattagattaagctcctatcaccttagttctcccctgctttgcaaatatttcatcaaatgaaggggccagctcaagcctattacagagctgtctgaggctggtgtatcagggtcccgtgccccagaggatctaaagctgctataactacttgtatattgctcaatatgtgtcagctgccagcaaaggactatgggtaagtttcccaaattataagaagagccatgtggtaaatcaccaatggattaggcacaggatgcaaagaatgttctttcaaatgtcacccacctggaatgatgcatggtgccatgaggaacacggcacggtgtcacttggacatgaccaaagtagaccgtcagaagtcacagcacgctgtagggccagatgaatttcctgaccactcctctgtgggtccctaagtcatgaggtacactaggcaatatctactcagtaattgcctctttccctaagtgagccagacccaatgtgttttttatttctccttaaatgagaatttgctagcaggcctgtattttttctcgcctaataacaagtgacagcaacgtgcgaagttagctgtagcaggcaccgaggactgaattttgcaaactcccaaacaagctgagaaatcagtagctgaccctcaaggtccagtggtatctagtggtcttcttgactgtgaacccactagaaaggattagggaagcccttggtaccagacactcatagactttggagtggggaaactgatgattctacacctactaggaagttttactgatcccagattggcctatttgacccaagtattctgaaggattggggacaatgcagaaaaaaaacggtgcttcttgagatgagatttcaaatattgctctctcaaggaggtgatctatatgtatgatttcaacttttcacatatagacccttcctagcattggggacatcaaagaaatcctgagatgtgttagaggactccacatttctcataactagcttgcctactagctgcatgacctccatccaggactgtacctatggccatgaagctcaaatcccacacaacaccaggctgtgtcatccctgtagacagtaacaccaacagctcccactggagctgtgaagcatggcagggagattttatctctctgataaatttcttcatttgtagagacaacaatgtcttattcacaggacaattgggtggataaaattgggcaagtgggtgaattaggcccttttcctgtcctcaacacaaagtccaatcctgacctcttaaccttcaaggcttgagacctggaacctggcagaaggagagtctcccctgtccatcctttacccacctcttctacctcatctcctcctcactctctggcatgtaccctggctccttccataatgaactacactctcttttctctgtgtatgtatgtgtatgtgtcttttttaaaaaattgttcttattttattctattccagctttatggaagaacaactgatgaagaaaaattgtatatattcccggcataccatgtgatatacatatgtgtgtatgtatatgtttgtatatacatacacacgcatataaaccacaatctgtgcgtgtatatatgtgtgtgtgtatatacacacacacaaatgcacgtatatataccacattgtgtataaataaaataccacattttctttattcattcacccattgatggacacttaggttggtttcatatcttagctattgtgaataatgcacaatgaatacaggagtacagatatctcttcaacatacagattttatttacctatttttggatatatatccagaagtaggattgctggatcaaaagagttaatcttttaaggaactaccatactgttttccacaatggctgtagcaatttacattcccaccaacagcgtacaagggtttccttttctccatatctttgacgatacctattgtctctcatcttttttataatatccattttaacaggtatgaggtaatattttattgtggtttttatttgcatttcctggatgattagtgatgttgaacattttttttcatatacctttaggccatttgtatgtattcctttgaaaaatgccatatttagtttctatgaccatttttaatcaggttatttgttttcttgctattgagttgtgtgagttctttacacagtttggatattaaccccttatcagatgtatggtttgcaaatattttatcccattctgtaggttgcctcttcattctttcaattatttcctttgtgtgcagaagttttttagtttgatgcaatctcgtttgtctagttttgcttttgttacctttgcttttggggtcatagccaaaaaagtcattgcctaggccaacaccaacaagcttttttcctatgttttcttctagcacttttacagtttctagtatcattgtttaagtctttaatgcatttcaagttaattttttacatagtatgagataagggtccaatttcattcttctgaatgtagatatcaagttttcccaacacagtctgggaaagaacaaagactgtccttctcccattgtgtgttcttggtgcctctgacaaaaattaattgataaaaaatgcagaggtttattttgtgctttctattctgttacattggtttagatgtttgttttaatttcaatactgtgctgttttggttactatagctttgtagcatattttgaaatcaagatgtccaaggcctctggctttgtatttcttgctcaaggttgttttggccattcagggtcttctgtggctccatgtaaattttagggttgtttgttctaattctgtgaaaaataccattggaatttggatagggatttcactgaatctatagatcactttggatagcatgggcatttttacaatagtaattcttcttacctatgaacatgagatcttttcatttatttgtgtcttcagttcctttatcaatgttttctagttttatgtgcaaaaatctttcatctccttgttaaatttagtcctaagtatttgttatgctattgtaaatggtattgtttcctaaatttatttatttatttttatttttattctttttgagacagtttctcactttgtcacctaggctggagtgaagtggtgcagcctcggttcactgcagtcttgacctcctgggctcaagctatcctcccacctcaacccccaaatagctgggactacaggcactttccaccatgcacggttaatttttttttttttttttttttttttttgtaaagacaaggtttcgccatgttgcccagggtggtctcaaactgctgagctcaagcgatcggccagccttgggctcctgaagtgctaggattacaggtgtgagccaccatgcctggctctacatttatttcttttagatatttttttcatcattgaatacaatgctacctgtgggcttctcatatatggtgtttattgtattgagttatagttttatacctaatttgttgagagtttttatcatgaaaggatgttgaattttatcaaatgctttttccgcatctattgagatgatcatataatttttatccttcattctgtgaatgcggtgtatcacatttgctgatttgtgtatgctgaatcatccttgcatcctagggataaatcccactggatcacagtatatgatccttctgaggtgctgttgaatttggcttgctaatttttttttttgaggatttttgctttacattcattagggatattggtctgtgattttcctttctgtagtgttcttgtttggctttggtatctgggtaatgctgacctcattaaatatgtttggaagtgtttttctctcttcaattttttgaaaaagtttgagaagaattggcattattttttaaataattgaattattttttaaatgtttgctagaattcatcagtgaagccatcaggtcccaggctcttctttgttctgagatttttgtttactgattcaatctcctttcttgttattggcctgttcagattatctgttgcctcatggttcagttttggtagatggtatgttccctagaaggttattcatttttcctaggttatctaattcattggcatgtaattgctcatagtactcccttatgatcctttgtatttctgcagtattagttgtaacatcttatttatttataattttatttgagttttctctttttcttagtccagctaaaggtttgccaattttatttatctttttaaaaaacaactcagtttcattgatatttttcattgttttgctcatttgctttattgatttctgctctgatttttattattttcttctttctgctaactttggactttgttcttcctttctagttccttgaggtatacagttagcttgtttatttaaaatctttcttttgtcttaatgtaggcatttattgctataaacctccctcttagagcagtgtttttctgtatcccataagttttggtatgttgtgttttcattttcatttttctcaagatatgttttggtttcccattttatttcttctttaatccattggttattaagaatgtgttgtttaatttccaaatatttgtgaatttttcacttttcctgctggttttgattttttatttcatagcactatggttgaaaaagatactgaatatgattttaatcttcttaaatttgttaatacttgttttatagtgtaatttgatttatcctagagaatgttccatgtgcacttgaaaagaatatgtattctgctactgtcagatggaatgttctgtatgtttgttaggtccatttggtctatagtgttgttcaagtctgttgtttccacattgattttctgtcttcatgatctatccatttttgaaagtgggatattgaagcctcctactaatgttgttgtctgttttaccctttagttctgttaatatttccttcatatatttaggtgttccaatgttggatgtatatatatttataattgctatatactcttgattaattgacccccttatcagtatgtaatgaccttcttcatctcttgcaaccattttgcacttaaaatctattttgtccgatataagcagagctactcctgcttttctttggttaccattgtcatggaatacctttttctgtcccttgaatttcagcctatgtgtgatcttaaagctgaaataaatctcttgtaggcagcatatagttgggtctttaaaaaaaatccatttagtcactgtatgtcttttgattggggcatttaatccatttacacaaagtaattatcaataggtaaggcattactattgccattttgttaattgatttctgattgttttgtagtttctttgttcctttcttcctctctggttgtcgtctttcatgatttgataatttttcatagttgcatgctaggatttctttctctgtgtcttatctgtatgtactacaggtagtttacttttgtggttaccataagtcttacgcaaaatagcttagagtataacagtgtattttaagctgataacaacttaacttcaatcacatacaaaaattcttcactttggctttcccttttctcacattttatgttattgatgtcacaatttctatcttttatatattgtatatccattaataaattgttgtagctatagttattttaatatcttttcctttaacttttatattagtgttaaaagtggtttatacaccaccattacagtattaaaacattcaggatttagctatatttttacctttacagtgagttttaaactttcatgtttttatgctgttaatgtccttttatttctaatagaaaaactttcttcagcatttcttgtaaagtgctctagtggtgatgatctcccacagattttgtttgtctgtggaagtctttatctccccttcatttctcaaggacagctttcttaagtatagtatttttggttgaaagtgttattgttgttttttttttttctttcagtcctttgaatatatcatcccactctcttctggccttcaagttttctgctaagaaatcaattgatacacttctggaggttcccttgcatgtgacaagttgcttttctcttgatgctcttaaaattctctttgcctttgaatttgagaatttgattataacatatgtcagtggagatctattttttttttttttttttgagacagagtttcactctttttgaccaggctggagtgcaatggtgcgatctcggctcaccgcaacctccacctcctgggttcaagcaattctcttgcctcagcctctcaagtagctgggattacaggcgtgtgccaccccaagcccagctaattttgtatttttagtagagatggggtttctccatgttggtcaggctgatctcgaacttctgacctcaggtgaaccacccacctcagcctcccaaagtgctggcattacaggtgtgagccaccacacccagccaaagatcactttatatttaatctatctggagttctttgggcttcataggtatgagtgttcattactctctccaggtttgggaagttttatgtcaccatttattaaataagctttctgcccattactctttctttgctccttcagggactcctataatgcaaatattgatttgcttgatggtatcccccacgtcctgtaggctttcttcactctatttcattcttttttctttttattcctttgaataatttcaaattacctgtctttgaactcactaaatctgcttgattgagtctgctgttgaaactctttatgaacatttttagtttagttactgtgtttctcagctccagaatttatctttggttcttttgtgttttttctgtctctttgttgaacttctcatttttttccatgtattgtttttctgattttgtttacttttctatctgtattctcttatacttcactaagcttctttaagaggattattttaaattatttgtcaggcaattcatatagttccatttctttagtgttggttactggtgctttattttgttcatttggtgggatcatgtttctatgaatatacataatccttgttgccttgtgttggtgtctgtatttgatgatgtaggtacctccttcagtctttacagactagcttcagcaagttaatctcttcaccagcttactttctcagaagttctgggtgggccatctgatgaggtccatgggtgggcttgctgctggagtcctcatgtgggaggtcctagagactggtccactggtgtgggcctggagtttgggtctgtgtggacaggcctggtgtgtgggtccatgggggcaggcctgaaaactgaatctataggtgtaggcctggaccctgggtccagtggggctggtgctggtctggcatcagcatccactgaggtggtcctagcaactgggtccatggagatgcacctggagtctggatcttcaagagaactggggtgggtctgaagcctgagtccctgggagtcggcttgtagccgggctggggctgtctgatctggcctggagcctgggttaggcctaatgccatggtccatggcaaagatggatgatcgcttcactcttcttcccccacatagagggtatctccatgatgtattgcctgggcttaggagaaggatgacacaggtaatgtgaaactgtcctttctaccctgtttagtgcatcttttcttatttctgtgttccacttgggtgctgtactctctctcctggattccttcagctcttgtgaagatatttttgcacatggatagttgttcaaattgatgtttctgcaaggatatgagttctgaaaactcctatcccttcattttgttgacattacttctatgtgtgtctttttatgggttttacttttatttattaaaacaactcatgtcaccattaacattttatcctcttactctgttctactcacatccctcaagattcaaactctcctctgaaagtgatgccatgccttccaggcagccttctctaactcaatcagtattttgagtctctattcttgtccacgattgtctatcaacttcaaacccatccttctatacactgttttgtgataggactctacaaaccacatttctgcttttccagccagattcctgttgaatgttgccaacagagggaactataaggaggctgcaaggtaggagaaaaaagaagaaattcctgtctttcaatttacttcctgtaaacattctgtctgcttccttttcttagcagcatcatgccagtcttgcattccatcccagaagtagtattctggtcctgtagcatcagttggatccaggcttcagatttttcccaacatttaagaacacattttattgtatttcctcagcaacatcaacagcaactggttggtggtcccttctcagaagtccgaattaaacaggttgcctccaacatattcagaaccactagcaccagcaggaaaggtgctctcctcaaagagcttaatttcagctctgcagggtctgatctccaagattctatattttaaaaattccaacatcttcattttgtttcctcagtccaagggaaactgtgctgtatccggaataacttattgttttctctttgccctttgagttacctagttaacaattcattattcctagtgaataattcttttgattgaattctctttgtttaaaaaaagctggtatggtttttttctcctgactggatactgactgatacctccacatacaatttatgatttacatctatcaaatgtatcaaacaaatacattgctgttatctatcattaatctcactcctgtctttcttctttctattcctagggccaaaagtagtgtctgactcaataaacaccgctgaatttttgaataatagcagaataaaaaggaatgaatgatgcctatcagagacaacacagttcaaggtataattgttgggacttctgctctggtctccttgctgggatggttgtgggtcagagtttatccagaaatgttccaatacgacaaaaaaacctcacagttgagaagccatggaatcctatctcaagtagttcacgagaagtcgagtcaataaaagagagggccctgtggtcttgatatcaaatcctggctctgtaacttaattactatgagactttgagaaaatgacttaacctctttgacctcagttttctcattcataagatatggatgataagacagatttcacaggattctcatgagaaatgagatgaagaaaaaagtatgcaggtgagccttttgtagtagatggtacagagcaggagctaaatatttgagtcatcccccttcacctccccaacccatctgttgcttgacacagcttaaagcattagtgggaatcaaagagatttcattttccaaatttctcaaaaagaagggcagactgtgatcagtcttcatcaccatcattaacaccattatcatcattatcattgtcatcatcatgatcatcatcatgattaactgatgtttccagcaaggctaggtgctttgcgtgttttcttttgtatatttttcacatcagtattttcctcaccatttaaaggtgagaaaactttcagaggttaaatcactgcacgaggtcccacagctatacattatcagtgctataaattgaacccatgtctgtctgggcccaagacccctgctcttctctctcactgcctctgaccacagcgagcaaaagtcagtcagatctatcctgtgtcctcccatgaagcagatattggctctaaagactgtgtgtttccgtatcattggcacttggcctgacttgcaatcctccctggcttccttttttctgcccatgtccatgcaacaagcatcttaaaacagccagcatgcaattggccatctgatgcctgaacttgaggtcgactacagaatgctggcatctatgatttgagtgccttcctgaaagacctccttcatgcattccttcctactctggttaccagttatggtgggaccctttggatgagagtttgttgagtactttatctcttatcctcagccgtgatgaccagttgataaaaggagaaggagtaaagtatgggagatgggagaaggaaaaggaaaaggaaaaggaaaaggaaggctgtaagtctgttttagtcattttggtcaccagctttggagccacctccttaggaagatcataaaccatctaggaatgcgaaaccaggcttttttggttctgcatccaccatcccctcccaccacatcactcagtgaagagccaaacccataatagacacagactagcaacagcccaagaagtagtggtatgcagtaggaattaagcgatctgtcttgtcgttcttgttctgccaacgatttgcttcaggcaagccactgttcatctccctggactatagttccctcctccaaaggaggaatagtgtgctgctgtagaatagacatgagctatattcagagagacctgactttgaatgcagtcatggccttttctgtgaccttacgtgagacacttaatctctcttggctcagtttctgcttctgtttagtgagaataagaacaatacctaccacatatagttaggacaaagactaaaccattgcagagtaaatatgagcttcttgcccattcaatgataagggattggactagatgatttttgaggtcccttgtaggcctgcttttctgatgtcccatgtggcaaacagtgcatttctgcacacaagaaagaccccttactttatagctaactctaagcatggcagcatgaggggtgggtgggggtagggaggtagagttcccaagttcactgcatttcaccttcctgccatgaatgatgttcttgtgatgtgctaggggaccacaggaggtttctggaggaagccatcaaacattcatgcttatgcctgatgctagactagacctaatgctatgcattaggtgctcagctctctttcaggggatgaggggtgagcacagccccctttcacatctcccatagcccactgcttgcccttgcctaaaagattcatcttcataaaagtttccaacatcctttacctaacctccatctaggctcaggccctcatcaactctccctttttactcctgtaaggctcataaagggctcttctgcctccagtcccagcctgctccaacccctttctcatcctggtgctggacacactgccagtggggctcacctacatgctggccacagatcattggtttctcgatacgtttctattatcttcaaacttttctacagtgagtatggattatttttataatttaaaaaagtttttaaaagctaaacttaaatatgattattcctctactgaacacctttttctctccccctgttatctttaggatagtgttgagtctcctgagcttggtacagttggccacttctagttccccccgccctcaaaagctcctctatacacatcacataaagacacttactttcctccaaatgcctcattctcacttattctccacacctctgggccaccattcatatagatccacctttctgggatgattttacctggagctctcacaaataaatctctacttagtcttcaacatgtaaaccaaaacattatctctgctgcaaagtcttccctgactacccacggtggcccttgcctgcagagttaacagttgtgtaccctgatgctgtagtgtcacttacttacatctactggagaaaagatcatactcaactgtggccatctctttgtgccccttcctgatttgatcatgagatctttgaaagcaaagaccttcatctgagtcatgtttgcattgctggagcccttcaaacatgtctgctttccacatatgcgtatgccatgcactgtgttaggcaccggatccattggggtgaataaacaatcatggcttctgtcctcctggggcttatagccaaatgggaaagacagaccaaaaataaataagccagcaactcaataagaaatttaaattgtgaaacacgtgaaggatgcagttggtgccctgataaagactaattgctagaaggggattacttaggattctcctaagaggcttctctgaggcgatggcatttaaagctgaagtgtttaggatttgaaggagccctccagctgaagagctgggagagctttccaggaggaagaatcagcatgtgcaaaagttcacggagtggagagagtctggcatgcatgaacgaggctctggcagaggccagggtggctgcagcccagagtgtggcccagtgcaggatgaaatgggatggaggagatgggcagagtgtggattcatttccaggtgcaataggaaggtgttgacttgttttaagctgggaagtgacatgactgaatttgagttttaaatgattactctgaccttcaggttcctcacctgaaaatcagactcatatcacctactttttaggtttttcttaggtgagagccattgttatcttatttttcttaaggtattttcacttatttttaaaaatatttattttttagttttgattgatacagaatcattatatatattcatggggaacaatgtgatgatttgatacatgtgtaaattttgtaacgatcacatcagagtagacctctaagacaaaacccgaaatatcaaaaggggctgacccatggagagggcagatttacactcctgggcataggaactagataagttggtcttcgttgttgttattgttgttggtgggttttttttctttagttgtttgttttgcaaactgaagtctgagtagcttgagatttggtcaaggtctactctgtcagaactgatctctacttctggcagctaaaacgcctgatcatccagtggtgatattttacagagatgaacaagctgcctagaggagtgggaaaccagccagatatccccatcctggtttgaccatgcctcatggaagggacatgacatggaagaccacaatatgaaggactctgaaataatcaaagcaaatggcatcttttcctggaaggtaacagcagcccagaggggggaaggaagattctgaagtgacaggagagttagcatcaaaatcgattttagagctcaagtctcctaacctaagtctggagttcattcccctacacttacttgtcaaaaagggcaactcccatattggaggatgtgccccgtcagggagcctttgaactcatcttctgccaaagtcaggtttcagcaacttcactgttgctaaactactcaccctggggaggtgaatgtgcttgtgaagtgaatggaaattcactcttcctgactgccaacccagcacacagaacttcttgctttggcagaataaggaggtagctgtgttctagactgggagtgctgggataagctgcttacacttaactcagagtagtgctcaaagggccagaagacattatctggcattcaacatcaaccttaacagaggaggtacccaagcccagagggcaaatgacttgcctgatatcacatggaatgcatggcagagccagaatgaggtcccaggtctcctaactcctggtccagtgctcttttcagcattctgtgccacctctcctcttcaacactgctttgaaactgcatcctgcctccttctagagcatgcatgtccaagagctggcatcaaacctcgtttctcccaatccctttgcagggtgttcccaaaagcatccccaaaagagcttgctgattttagaagcagaaacgctttacagttgcctaatggtaattcctaggtaagatgcactaaatacccccaatgaaaatgtatttagtatgtcttacataggaaggctcccccaccccctccaacacacaaacatactccttggttcatttttcaatcactcagtttctttgagtttctaaataggtaaatcattagttcttcctttagcatggatggggctgggaaggtggctcatgtgcgtatgtacagtatagttcctcatttggctcaaaacaatcaacaaaaaatcaggtatttttattcatcccattttactgatgcatacatttaaccattctccaaatgcagtaattatgtcactatactattccagacactgtgctaagcagagttcctattctcagggagatggcactatgtcagaatggagaaactaaagaccagaaagttgaaatgacccgcccaaacttgttctacagtaagccaagccatgaatcagtctcttttttaaatctcatactctatgcttggcactgagttacagcttgttaagattgaggctgggacaagatgacacccaggggagggactcattcatcttctttgtcctttctgaatcttagagtgattctagggcaagaaaatcatctcttcttgcaaatgactggtatgtagtagctccctacaaaccatgccatgattaggcagaaaggagagaaaatcagcaagctgaacctgggtttgtctgtctgagagagaaagagagagggagagagagaccaatgctgcaggaatgggcctgaggagtcatacatatctaggaatttgttattgtgacaagggaagggccttccctccctgtactcacacacttggcccctgtatggaggcccttccctcccattcctccactctttgagagttccagaaacccttctccagcaccctggttcttccttgcccaaagcgaaggctgcagctcccctagccatcccaagcatgtacagagtttgcagagaacatgtgcatttgtttttcaaaaatgaaaagtctatcagagtggagattatggaagtggagagaactgacaacaaggacatttgggcatgaaagacatttgcctggggcttcacatttggatttagcctcaaatttagacttttgattcctaaatgaggttatagaaacagatgtggccattttgggatatttgagacagagatttgttaaatgcaaatatttagcacagtccacctttttttttttcccagcccaccattttgtaatcctgttttatcatttctcagaataacagcccggaaaatgggagtcctattcgacttggagagaccacctctgggaagtcaaatgaacagagactatcgccctcactccgcagatggagaaactgagatccagagccctcagctcagcatcatctaaaagaacaaccatattccttgtgtctagcagcagcctagagatgccccaaggctgcatcatccaatgtgaaagccaccagccacactaggttattgagcgcctgcagtgtggcaggtctgaaatgagaatggctgtcaatgtaaaatacttatcagagtcctgaagacttagctcaaaaaaagaatataaaatatctctttaataattttttatacatattacatgttgaaatgatattattttggatatattgggttaaataaaagacattataagaactaattccaccccttgcttttaactttttaaaatgtgactattagaaaaatttgaatcacatatgaggctcacattatatttctattagacagctctgctctgagggaagtaagtaccatttatcccaagcacatgctggtttatattgcagcagggggcatttctgctaaatgtttaaaaacaggccttgaggagtttagatcagctcttgcccatctcattggcaatgacctgaatttggggattggaatgagctagagctttcagaaccccagccttatttctctatttctgaatgtacagatatccattgagtgaggtcagggcagtaacgggaggggtgcatgaggagctaacattttgaatgagaccatcacactaaatgcaggcttgctccctataaatcaccttgatttgtcaccaaatgagatgacaaaatgagacatccaggcggaaatgaaattcccgctgtaacagcagcatcgacccactctgacttgcagtgcacagagggttgtcacacatgagtttgagcaccagagtatcaggggaggctccacgtatctggttttgctcctgggctggtgggcaggggtgagtcagcccttaactattgggcagtggggatatgaatcacctggtcattccttaggttgggctttacccagggctcagggaaaatgttccgaggtgactttgacctatctggggctggacctttgagttcagactgtggaacaattttgatataacccaaatgagcactggtaaagaagagcaccagcccctgaggtgccagcaagctctaaagcctctagtggcctccccttctgaaaagaactccaccactgggctgtatcctgggtgctcaagctgtgcacagtccatctggagaccaaagtgcagctgattctgtcctttgttctctgggaccttgagttatccctccatgtctctgggactgatgccttcttttgatcaactgtgttgacgttggcctagatgatgtctcagggttttttcaactctgacacatgccctatgatgtgattctaacacacacagatacgcacaaacatacaaaaacacacagagaggcacacagaaacagacacccacccacacacagaaatacacacagggatatacacagacataaccacacagacacacacagacatgtacagagaaacacccatacaaacactcagacccatagatacacacacagacacacccacccacacacaacccactgattcaagtggctacaaaaacctaaacaacttaccaataaaacactccaggctccttcaatccactgcaacccctgctcagagtgttgtcttaattaatgcttctagtcagacacatgcacaaacacacatacacagacacacacagattcctgcagtcagacacatgcacacgcacacacacatacctctagtcagacacacacacacacagatgccaaagtcagacacatgcacacacacacacacacacacagacacacacatgcctccaggcagacacatgcacacacacacacagacacacacagatgccttgagtcagacacaggcacacacacacacacatagacacatagagatgcctccagtcaaacatgcacagatgcacacacacatagacatatacagacacagacccacagacacactgaaacagaaacgcagccacacacatagacgcacataccttggccctttctgttttcatgcccgtgccttcctcctacctgcccccagccttgcttcccacttaaggtctatttttttgggctcaggtcactcactaaggcaagggctacactctattttgcaggtaactcccagcaacatatccagttcacaggcaacactggctacctctccacctcccattcatagcccaatgtctttaacctccccctcccatggcttcttctcaacaacccacaatgtgtttgaattccctacatgctagaaatcctccattccccgccctcctccctagcccatctctccttccctttgccgctgagctccttgaaggagaggttaataggcatggcctccgcctccactcctcccagcactcctcagccctctgcctccaccactccatggaaacctctccagcaaagtcacaaaggggctaattgccaaatcaaatgcactccttttagtcctcatattaccagacttttaagtagcatctgaccccatggctcgctcccttctggctcctgtgacaccactcaccccactccccgccccttctctgagtgctccttctcagtgttcagcagtttacccttcagacactcctgtgtcccaaggtcctggcctcagccctcatggacacctgtgccttgcacctgacatctcaggtcaatagcagtcagttgggcattttcactcatggttcctgcaggcacctccaggaggccagactgaacttaccaacttttctctgttctgccaccacctccctccttcctccctccccttattttggttatttgcaacaccatccctgcctgacaccaagccagggggagtctagaagtcaatccagatttccttcccattccttgtaatccattgcattcaagcggtcacggaaacctgaacacctcattgatgagaaactccaggcccccgaaccaccatgacccaacccacagaaatatctcgatgcctccaattgtaacatgccatcccaagccacatttagacagtagctacctgtctgaaggatgcagtcccagcatctttatagcctatctccactaaacgtctcagccttctctggtgccactcccttgaaacatatgcaataccacggattttccagactatttttactcgaacattttcatgcggttgcacatcccacaactggcctgggtactgctacaggctgcatggcctccctgtgattcttggtctgctttaaataattaaatattcaacaccactgttgccccctttagggagcttttcctgatgagccctctcagcctttagaaagggttaaatgcctctttctggtctcagagtgccctgtttagattttcagtataaccctcatgcggcccaatatcaccttagatttgcatttttttctctcctactatattgaactccttatggacagagaatgatttttttttttctaaattcccggagactaccacagtcacagtacatagaaaatgtttattgaataaatgaatgaatgaatgaggcaaactaactcagcccagggaaagagttcaggtctcactcagagccctgcttttttcctgggaaggtcaagcgctagtgtgggttcctggtgacacctagcaacagttgccatgacaacagaaagcaccattttctcagggcaatgtcccccacttccccacctggctctggaggaggcagcccccctgctttgagtcaggaagcagtgagggggacagcctcactgaaatagttgatcatgtgccctggctcaacccccctggagaggggaacctgatggaaagggagaaaattggatttgatggaatcagatgtgcctgggagctccaggcaaagaaaggaaggatagacgggggccaactggcagtggaatcctggggtaaccagagggagagtttgtcagaggagtctccatgtcaacagggagctgagacgagatgttgtccctggggttgggtggagcacagcataggaagggtgggaaagtgtgggcctgagagatccaactggaacacagactgtagaactagaatgctccgcctcccaggcccacccccttccaggtcctctgcaaaggtctcttcctggggcagctcctacagttcctaacggtcccctttgcaatttgccatacatgcaatggagtcaataagacccttgaggagagaggttgtgtctgttttaaccatccctgcattcccagtgcctagcatagaagatgcagaataaggagtttatgaacaaatgaaaggctgtgctgagacaagatgaggggcttcagggctaggtggccaggaagagaagccactgaaggcctattccttgccagtcacaccacatgggtgctgttatggaagatgaggaaactggggctctgagagggtaagtcgcttctccaggccacattgctaaagggtagagtcagcatatgaagaggcttctgactggagggcccaggacttctctttacctggtttccttgtcctacctttaccctcagacatgtgcatgcactctccaggcagggggcacctgaataatagatcagatggcctctgctttctttaccccgcagccctcagtgtgcctggccctgatagataaggggtatgggatacatcgtggacagatggacaccaggcaggttcaaagcagggagtctgccagtctatccggctaagagaccttaggatagccagcaccccagaggggagagtcaacttggtaaagggagtctccccttccttttctcctctcctagagctgctcttggttcattactggacatggtgatagtttgggggagtaataaaggaaattcccatttattgggtacttactatgtgccaggcactattctcagctctttatgtgaattaacttacttcatgatttcaataaactaaatgaggtaagtaatgcttttaatctgcttctacaggagaggaaatcaaggcacagagaggttaacttgatggtcacccatagctaccatgtggcaaggctccagatgtgaaaccaggtggtttggccggagcctgtgctctaaccattatgccactcttcctccctcatctggcagtaagtttctgggctttgcattcagtttggggtgccaccatcaggagctcgagacattggctatgctatgtaacctccctgagcagaatgcagggagtgggtaaagtaagaaagggtgccctaaatatgaactccttttctcaggctttgggtagcttccaggccccgtccacagacacctaggtgcaaggcccagccctgctctgctctcaaacaccaaacgtggccacaggcaggcagaaaccaagcagcttcagaacagaagcctagaacaccctagctgccaatctggtccagaccttgaggcccacttctgaaaactgagcccttgaacctctgcttccttatctctgaaatggggacatggatagctccccatgcatgttgcaaggcttaatgggaacgatgcatatagaatgcttggcatgtgttaggtactcactcacaattagtagtttcttttatcccagatccctccgccttaatcctcttggaaataatatcgctgcattttttttttttctgagtcttgctctgtcacccaggctgatgtgcagtggcacaatcacggctcactgaatcctcgacctcacaggctcaaacaatcctcccacttcagacttccaagtagctgggactacaggtgtgcaccaccacacttcgctaatttttctttcttctgcctttttttttttttttttttttgtagatacggggctttgttacattgcccaggctggtctcaaactcctgggctcaagagatctatctgccttggcctccccaagtgctgggactacagggacgagcaactatgcctagcctatccccgctcttcatctttaagtctggggctacaatttggggtgacagaaaggctcttacttccaatgtgcaagggtagagactccagtttaaacctcatcacagtccagtttccctgtagtggtcttgggctgccctgtcaaggttttagttcacagctgaattccacaggaaatgcaaggctcccacagctgagagcctaccagggattccaggccaaagaatgttgagtgtgatcctgttggagtgccatccggccaggccatgtatggctcatctcagcttcatgaggcccaggggcgaggctctgctacagagcatctgctctcctatctcagaggctgctgcctcctcccttctcacagggatgttgtggaatttttttacaataagccctcatcttcatcatttcaaaaatctcatgttctggagaaatcagctaccctatgatggccacagaagagtacatgaatgagaaaactctaattctatattcctttcgtaataagattttcttagcatgttttaggtttggactttgccaactcctttggtccttgtgaaatagtaagacgtttaggttaaacaaaataaaaaacaaacaaacaaaacattttactagttgtgtgaccttgggcaaatgcccaacctcttaagattcagtttctctttttataaaatggggagatgaccaactcacgtgcctaccatgaggctcatatgggataatacattttaagtatatagagcagatgctacaatggtcacaaaactctttttatattggactgtcaaaataaatgtacctctcaaaacataaaatgaacatgtcctttcgtccagaacatgcaagcaatatccatcgatatgtaagcaaaagtataagatgtgctcatatgtata[133 bp omitted]aaccccgtctttac[146 bp omitted]agagcgagactccgtctcaaaaaaaaaaaaaaaaaaaaaaaagaaacaatgcaactgcccatcatgaatccatctttacagcgcaacattatgaaataggtccccagatgatggaaatgtgtttgaggtaaacaaatagtgaaaataaaaccccaccaaagtgcaaaacagtatatttaatacagttgctatatataaaaaaggagatggttatagatattggcatagctatagatatgcatgtgtgtgtgtaacctatctttactggaaggatccagaagaaatttttaacagtgtttaactttgaagaaatggattggggatctaggtgtggaagatgactttgactttcattttctaccctcctgcagtgtttggatatttgtatcatgtttatatgttacttttaaacaatcggaaggatagatcacagatcaacaacaattgtaagtgcttttaaaaatttacaaagcctaagatattcatcaggatgcttaacattttagtttatcagaataaaatgaaaacctgaaatgtgcctcattattttggttatctattgctgtgttaccaactactttaaaacacagtggcttaaatagcaatagtttcatcacaggcataccttactttattgcaccatgatttaatacacttcacagatactgtgttttttacaagttaaaggttatgcatggagcaagtctattagcatcatttgtcaaatagcatgtgctcactttgtgtttctgtctcacattttgggaattctcacaatatttcaaactttttcattaccattatatctgttatggtgatctgtgatcggtgacctttgatgttactgatgtaattgtttgggggcatcatgaatctcacttatataagatggcaaacttaatcaataaatggtgtatgtgttctgactgcttaaccaactagtcattctcctatctcttcccctttcccctggcctcactattccctgacacccaacaatattgaaattaggctaattaagaaccctacaatgctttctaaatattcaagtgaaaagaagagcaacacatttctgactttaaatgaaaagctagaaatgattaagcttagtgaggaaggcatgctgaaagccaaaaaggccaaaagctagtcctcttgcaccaaaaagttagccaagttgtgaatgcaaaggagaagctcttgaaggaaattacaagtgctattccagtgaacacacaaatgataagaaagcaaaacagccttgttgctgatattcagaaagttttggtggtctggatagaaaatcaaaccagtaacagcattcccttaagccaaagcctaatccagagcaaggacccagttctcttcagttctatgacatctgagagaggtgagaaagctgcagaagtaaagtttgaagctagcaaaagttggttcataagatttaggaaaagaaaccatctccttgtatgtatcttcaccttgcataaaagtgcaaggtgaagcagcaaatgctgatgtggaagttgtggctagttattcagaagatctagctaaaataattgacaaaggtgaccacactaaacagtagattttctatgtagatggaacagccttatattggaataagacaccatctaggacttccataacccaaaaggagaggtcaatatctggcttcaaagcttcaatgaacaggctgactctcttgttaggctctgaatgcagtcagagactttaagttgaagccaatgctcatttgatatctgaaaatcctagggcccttaataattatactaaatctacactgtctgtgctctataagtggaacaacaaagcctggatgtcagtatatctgtttacagcatggtttactgaatattttaagcacactgttgagatctactgcacaaaaacaaatattcctgtaaaaatattactgccattgacaatgcatctggtgacccaagagttctgatgaagacgtacaaggagattgatgttttcatgcctgctaacacaacaatcattctgcagcccatgaatcaaagagtaattgtgactttcaattattattatttaagaaattcatttcatgaggctatagctgccacagatagtgattagtgattcctctcatgaatttgggcaaagtaaattgaaaatcaccattctagatataattaagaacatctgtgattcataggaagcagtcaaaatgttaatattaacagaggtttggaagaagttgattccaaccctcatgggtgactgtgagggtttcaagacttcaatgaggaatgtaactgcagatgtggtagaaatagcaagagaactacatttagaagtggagcttgaaatgacatctttctaaggtttaagaagaatcataaagttacttcactgtagttctcacattgactgaattgctgcaatctcatgatataatcttaacagatgaggggttgttttttatagatgagcaaataaagtgacttctttttgtttgtttttttttttgagacggagtctcgctctgtcacccaggctggagtgcagtggcgcgatcttggctcactgcaagctccacctcccaggttcatgccattctcctgcctcagcctcccgagtagctgggactacaggcgcccgccaccacgcctggctaattttttgtattttttagtagagacggggtttcgctgtgttagccaggatggtcttgatctcctgacctcatgatccgccctccttggcctctcaaagtgcgggattacaggcttgagccaccacgcctggccaaagtagattcttgagacagaatctactcctagcaaagacactgttgaaatgacaacaaaggattgagaatattccataaacttagtcaatagagtagcagcatggtttgagaggactgactccaattttgaaagaagtactactgtgggtaaaatgcagtcaaacagcatcgcatgccacaaataaatctttcatgaaaacaagagtcaatcactgcagcaaacttcagtgttgtcttattttaagaaatcaccaaagccactccaactttcagcaactaccaccctcctcagtcagaagccatcaacactgaggcaagaccctccaccagcaaaaagattataactggatgaaggttcagatgatcattaacattttttagcaatgaagtatttctaattaacgtataaacattgttttatttagaagtaatgcaaatgcacatttaatagactacagtatagtgtaacaataacttttatatgcactgaggaaccaagaaatttctgcgactcactttattgtgacatttgctttattgtggtggtctggaatcaaacccacaatatctccaaagtatgactgtatttgtcatgattctgagagctggccagatagttctaacctgagcttgctcaagtggctgcattcagctccaagttttctgaggcctgggctcagctgggacacctgggcctttgtcttcatggtctttcatctcagacttctttatggtatgatctccaggttccaagagaataaaacagaagctacaaggactcttgaggcctagactccggaagcattactcctgccacacgctttggccaaaggaagccccaaagtgagactggtctcagggatagggaaaaatgcctcatctcttgatattttttgcaaaaaaattgtggctacatttaatctaccacactaatattaacagcataattgcagtttgcatgaccaaagtcattatttttatcagtgtattttgccctgttttccagtatctggtggtccctgggccatagtagacctggctcaataaatacgtgttgaatgaatgaataaatggctccactccgcctggcagcctctttactctaactgccttgacatctcagatcttcaaatgtcatcaactccagttcagctagcccttgagggccactgccccagatccaagttcaagagtatggctgagttgggctctggtggggagatcatgggaggtagtttccatagaactcatcactgcttgctctccttcccaacctaacttcacatgagatcttgaaagcagggaactttctctctgagtcagacctgtcgagcagaagaagttagagagatttgagtgatagaggaactcaatgtactgttgtcagagggagtaatatagaaagcatgagaaaaaaccagaagcctccaggagcaaagcccagctcccagctgacaacctcaagaaaatgaggacctcagttctacaactgcaaggaactgaatttggccaacaacctaaaggagctcagaaacattctttcccaggacctccaggaaggaatgcagccccgcccgcaccgtgatttcagcatcctgaaacccttactggaggagctggtggagctcatccagacttctgacctacagaaactgagataacaaatgtgtattgttttaagttgctaagtttatggtgattggttatataacaatagaaaagtaatacaatcaccatcacactaccatcaccactaccaccaaattattatcacccaataccatgactgtcactcccacccattcctgtctccatgttcctcaccagtatcaagactactgccatcataagaatgatacggtggactctggggactcggggaaaaggctgggagggtgtcaagggataaaagactacacattgggtactgtgtacactgcttgggtgacgggtgcaccaaaatctcagaaatcagcactaaagaacttactcatgtaaccaaacaccacctgctctctagaaacctattgaaataacaaacaaattaaaaaaaaaaaatagactactgccatcactccctaccaccatcactcagggccctgcaatcttgcataagtactagacttcaatctctctggaaaagtctatatggcccctgccctggatctgcctctagcattatctggccgatacctgccttggactcttgcccaccagttatcaggtctggcccctcaacctaattctcatcagttccttttccctagggcagggctctggaatctcagcccccaggcctgagtttagtcttgccagtgactggtcaggtcttttggaatctacagacccagtgtccacctgagggaggaaactcttgttcccttgaagttcctgctatttctgtcatctctctcccccttcctctaaacatggatcagatccctacagagttagcagatgagatcagcgttgagtttgccacaccttagagcagagattcacagtgttaggtcacatagggacatcttaaaaatactgatgcccagacccagtctcagaaattataactcaactgaccggggatggagccaggggcttttttttgttgttggttttgtgttttgttttgttttttttttttttttttgagacagagtctagctctgtcacccgggctggagtgcagtggtgcaatctcggctcactgcaaactccacctcctgggctcacgccattctcttgtctc[135 bp omitted]gccttccaaagtggggggttggtatttttaaaagtactccaggtgatttttatgtgcagccaggattaagcaccacttccctggggctttattactaagactcctctctacctctggtcagtttctgctgtgcctaaccctaaactgattttgattgctttgtctgcacttgcagttcccagcattctgtccaagttcacccaaaacattaatgacaccagacttgcttcctaattcccctctatctctggctgttcccagggtacggttttggacacaaatttcctgcacttaggtatctcctcccatcccacctatacaacctgctcagagttaacctttacttatcctacataaaatattactaggaagtaagatgggcaatcactgagtatccacccttgaaattctctatatctcttaatagctaccacttaattagtatctgctatgtgccaagaactatgctagacacttcaactgtgtaacccaaatataatctagagctcccacagtctggtcttcatgcaatttcccatgaaaaaaaaaaacaaaaaaaaaaacaaaaaaacagcccagtagccaatagaatataaaagcaattgtgatttttactgatcttttggcatgaagaagtggttcattaataagccatagcaacccttgttaactcttctttttacattcctcttgccctcatagctttcctgcagctcctctgatatgatttgaatttgcgtccaggtccaaatctcatgtcaaattgtaatccccagtgttggaggagggtcctggtgggaggtgactggatcatgggggctcttcttatgatagtgagtgagttctcatgatatctggttgtttaaaagtgtgtggcacctcccctttctctctcttattccttctctggccacgtaagacatgtctgctccccctttgccttctgccatgcttgtaagttccctgaggactcatccaccatgcttcctgtacagcctgtggaactgagagtcaattaaacctcttttctttataaattacccagtctcatgtagttctttacacaatgtgagaatgaactaatacaccctctattcatgccccaaatcaactcctcatcccaaagtttatctcctaactcactgacctttctctttcttctcctcttcctttccttctgcttctatttgtctctttcctaagtaattcttggctctttaggatacaaatccccatgatactttctgcagttctctgtttctctttctctctctctctctctgtcacaaacacacacacacacacacacacacacacttcagattttgattctgaactgctgcagaggctcacacactgatctggcagactttgctatcatttgaatgtgtcccctccaaaattcaggcattgccaatgtgacagtattaagaagtggggcctttcagagttgctttgtccatgagagcccctccctcatgatggaactaaggccctcgtaaaagaggcttcacacagcatttgcctcacttgcccttccaccttcctcaccatgtgaggacctccggaggtgcagcatcaaggtgccatcttggaagcagagagtagccctccccaggcaactgagtctgccagagccttgactttggacctcccagcctccagaactgtgagaaataaatttcggttctttataaattacccagtctcagatattttgttttagctgcacaaagggtctaagacagactccaaagacaagttctttactgggtaaatgtgggcagatggggtcacagtggatggaagactgcaaatacaatgtttgttataacttactgtatccctataacatacagatctaatctcattcaaccctatgaggcaggtgttactactctcattccacagataaagaaactttgacagagggaaactaatcaagtcatggaggcaggatttgaacccaggcctgtcttactcttaacctataaatcagccagctcctgaaagggctttatagaggggctcttgagaacctggactcagtgtatgaagagctggaagccacaagtatagacatccagccagattgggctgctcagcacccactggctgtctctctgacttcctggaagagctatcaagactccccttacagaaacagcctcttcatgttcccaacaatggctcttaatctcagcactacttagaaactaatgaggcagaaagggttaatttcagatcccccaacacatgcacaagtggatcttggagaatccctctctctgtagttacaaggaacctgtttttcccttctctttcttccttttaggcaaaccatgcactgggcggtggccccaggggaaggaagggtttcctgaagcatggtcactgtcgatagcattagcaactttgggctgttttctttccatttactttccctcctggcactaaaacctcattagagctctgacagaagagaaatggctggagtggagaaagaaactcttgcatttcccagaaattctgctctgggtttccattgcctgtttcctagcaggctggaccggcagtgaccccaagagacatgctcaaaacctggccagcgtggggaggggtgcagggcaggcctgaggcccaaccagacccatttagtccctctccatcctgcaggaactggatttcagagtccatttttttgtggtttaggatcatgtacacctggataggacagggtttacttgaatcctctcttggaagccatagtctgctgagcaaatgaatggtgtaaatgaggctggggagtgggggagtgtttaacctaattaagagaaactcttttctcaagcactttagcactttccctttgcactgtggagaatgactcactgaatgcagagctggccaacatggggcctcttggaggcccccagtggacagcactttgttgtcactacagaagtccctgtgatcacataaaggaagcaacactgctcaggggaaatctcctgatcaccttggcagaggctgagagaccagctcctagaccctgctctgcctcaagcagatctgaggctattgccttgttccttctgagcccctgagtctttgtctggaaggtatgaaagctagagagatttctgagattcactgctgcccttgctaacattcagtttttgtggcatcatagaacctttaaagaatcagattagttccatcaacatttactgagcacttgctgtgtgccaaaatggtgctgggtgtcagagatacccctataccttagaaagttgcaccccctcgtggagtggactgctcagtgtacacacttgttaccctgagtgaagcacttacacacaaaagcacccgaccttgcataaacattcaggaagatcctggacccactaagtcccacctagcacctcagatgaccaattcctggtttagattacctcaaaggttttctcaaaggttataatgacttatatttcagaaaaatgtggtttttttgcattaaattttccttatttcccactgttaattgtaaataagacagcacaaagccaatgtaatagcaggttaggatcggattttagttttaggtctgacttactaatcctttagccatggggccttgagccaaccacttaaactctctaagcctcagtttccttatcaacaaaagagggataaaatactgccctcatgcatcatgcatgtcaataaaaggtcatgagaatctagtgagactacatattcaaaagggcttctgagagtataaaaatcaagaatgattataaaatgctgatgctgtccttaccaggattgtgtctttatcatagcagctgtgcaactttgtctaagaagcttcacatctcaggctcctttttctcatctgtgaaatgggtatggtgggtttaatctcacagaattcagagggctggagatagcctacgcaaaggttaacttttaagggctcagtgcactgaaaggacttacagaacctgcaactgcttgatgctacggttgtgcaattattggatttggagtcttgcaataagtttgctggtattttttgcagagactgtggaaagcagtccttctttctcagccaccttcacccctggaatctatgtcaaggtgtgtattcccaacagcagtatgcctgccctgaagtcttaatgagaatgaggagccctgcagcagctagaaggtgcagccgctagccatgcatgaagttaatttagcttctgtaaatgtctggcggcttaggtagcaagagacaggcctggcctgcatagatgatccgtgctctgccttggaaatgatggaggagaaacagctctcccaaaccgatgagtttcattcctaaagtgactgcaccataacctggggagactgggcttgttttcatcttaagctgaaaaggtttccaaaaacaatcatttcattgtttttctactcactgctaactcaataaaagtggttcttttaattaatttcattgttcctcattgtgctgtttttgaactaataaaaacgttctttctgctctctccatggctcttgcagcctccagccatttcccagcattcatcaactccccaaatgccaaaggtggatgggatgtcagaccatttaagccaattcacctcattttgcagatgagaaaactgaggcccagagagggatagtgacctattcaaggcatacactgaattagtggccaagttgggattcaaacccacttgggaaaggctcggccatgcagctaacatctgacagtttttgcacagactgcgttagaacctttcagcaactcctttctttctattgattttttctcataaaatcaaagcagtagatagttgtaaaaagaaaattggcctccagatttaacaaaattacccaggaatgtggcaatccacaccaaatacctgtttaaagagaaaacaaaaacactccaatgaaatattagtaagaattctgaaaatattaacaatgcctgatgctaacaatgataaagtaaaaataagaaaggtgataaatgtagttcaataccccaaaaaagtggcaatttaataatctgctcactgggtttcccaagttccttccactggcaaagatgtattccttggagaactaggaatcagcagagtttacccccacctgaaaatatctcagtacctccaagtttccacctgaaagagttatttgaagcattctctacttttgcaatcatttaagttcgctgacatctttctaaatatccttcctggttacacggccatgggcttttatgtcatcacgggtcagacttgtgttaaggagggatgctgcccccctataaccatttagttgccacctctttgaaaaaaaaatcctgatttctagagtcacaagttatcttttgctccccaaaccaacctgagcactttattcaaaactctctagaggccctaagaagtagttgcatactatttcagttcagatacaacttcttttgtacactgctagttcccttaggactgaggccgagcctgatttctgcttaaaggggatgacagaaaaagtgtaggatctagagatagaagtcatgagtttgagccctagctctgtcgttagcacaccctccattgtcactgatgtgtctgtgtctttatcatccctctcctacactgcaaggcaagaatcatcttcctctcactcactgctatatctctaggacctagaacggtgctttattcctagcaggctcacagtaggtttttattgattggatttttgaaaggaggtacagatttgggccatgacattgtgtcagatctttacctatgaagtgggaataacgatatgcattattttatatccacaagaccattcaatcttacagacagcccagggcagcaggtattgttatcatattccacatatatgaggaaaatgaggttcagaggtgagttttcacagcttgaaaagaatggagcagaatatagtacgtaggtaatcaataccaaatttggtgtacctgtagatgttatctttcaaaatggaagaaagcccccatgatacaatccattgccccccagccttagaagcagagatattttagtttgtgagagctccattaggtatggaaatgcataacccacttcacctccatggaggtcggtgctggaccccagtcctgctcattaggaggaacaaagagttcttgctgcaaattaaagagaatctcctttctttgcaattcctaacatgtgcttcttggagaggctgtgcttttagacaaacactttgagaacctatattgtcctaggaactatattagttgctatggttgacacaaacctgagctccacactcaaatgagtgtgtagtctggttggtgtaggaaggcattatgctcgagtcaaccttgcttcatacacattcacttccagctatgaatttactcttttaataatgcatggatgctatctcatttacatactccgctaggatcattatttcaccagcagccattcaccacagtttcacaagaggacatatctggagtcataaaatattggaagaaatttcggagcagataagaactgactcccacaggtgttcctggagatgagcacagatcctcagagaatacatgaaatcctctcctcacagagaagcgatttcctgctcctctcactgttgctgccctggcctcatcaaatgcagacagcaagtcctcttcttggattgaatctttctggttccatctcctaccagtccccccatctctcattcagctctggctgcccagctctcatggctgttccttgaacatatctgggtctctcttaccccagggactttgcataggcttttctcattgcctggaatactcttctttagatagccttgtagctccatcaacttctcaaagacttgaagtctttgacttcgttcaaacgaagtcttccttgatcatccccctcctacctcccccacaacaccaattagttacaatttaaactattcctcgctatgtggcattctcaatccattcctttactttatttgttttcatacaactcttccccatcttataaattatatattctacttgtctatctttcttgtctacattctaggaagtagataggctctgtgaagataaggatttttgtctgttttctctattactgtcatccagtgtcaagaaatgtgcctggcacaaagtagacattcaataaatgaatgaatgaatgccctgaggaatgtctcacagtgctaaaaccaaaaaaaaaaaaaaaaaaatagtaaaatttaaaaaaagactctcactaccttctaagtgggtacagcccttcatagtttctgaaacatatttgcatgaataatctcacttaatctccttgtattggactgaattctactctcccaaaattcatatgttgaagccctaacccccaatatgactgtagtatttggagataggatctttggaagacaattgaggttaaatgaggtcataccagtaaggctccaatctgataagactgtagccttttaagaagagaaaaagaaagatgtatttttctctctgtctgcactgtgaggacacagtgagaaagcagctatctgcaagtcaggaagagagccttcaccagaaaattgaatctgctggcaccttgattttggacttacagcctctagaactgtgagaaataagtttttgttgtttaagccacctgtctatggtattttgtgatggcagcctgagcagactgagacaccccacaaaatagaccctgcctggcagatttgatcaccccattttcaagacacaacagcaaaggcccagaggaattgaattcacataagtagtaataagtctgccctgattccactgaaccaggctaacacagagcatggtcaacctccaaagcctgaatcccacacaattggctcttcccttcacaactaccccctactactagtgtccatttgcaaagggcctacaagaaaatacagcatttttcaaacacatccttcaaggagtgaaagttatgagggtttctagtgaatgtgttgcatataagcccaagaaagagtgcacactttaattgaagagcaaagatttcatgcacttctgccctgctcctcacagtctatacccttccagcaccactttcagttttctagaaatccacccatactttcattgatccataatccatccattcgaaatttttgagggcctactatctgaattaacaccatccgaatgtttgaggagaagccaagatggctgaataggaacagctccggtctacagctcccagcttgagcaacgcagaagatgggtgatttctgcatttccaactgaggtaccaggttcatctcactggggagtgccagagagtaggtgcaggacagtaggtgcagtgcaccgtgcgcgagctgaagtagggcgaggcatcgcctcacctgggaagctcaaggggtcagggaatttcctttcctactcaaagaaaggggtgatagacagcacctggaaaatcgggtcactcccaccctaatactgcgcttttccaatgggcttaaacaacggcacaccaggagattatatcaagcacctggcttggagggtcctatgcccacggagtcttgctcattgctagcacagcagtccgagatcaaactgcaaggcagcagagaggctgggggaggggcacccgcaattgcccagttagttgtttgattaggtaaacaaagaggccaggaagctcgaactgggtggagcccaccacagctcaaggaggcctgcctgcctctgtaggctccacctctgggtgcagggcacagacaaacaaaaagacagcaataacctctgcagaattaaatgtccctctctgacagctttgaagagagtagtggttctcccagcacacagctggagatctgagatcgggcagactgcctcctcaagtgggtccctgacccctgagcagcctaactgggaggcaccccccagtaggggcagactgacaattcacatggccgggtactcctctgagacaaaacttccagaggaacgatcaggcagcagcatttgcggttcaccaatatctgctgttcttcagccaccgctgtggatacccaggcaaacagggtctggagtggacctctagcaaactccaacagacctgcagctgagggtcctatctgttagaaggaaaactaacaaacaggaaggacatccacaccaaaaacccatctgtacctcaccatcatcaaagaccaaaggtagataaaaccacaaagatgggaaaaaaacggaggagaaaaactggaaactgtaaaaatcagagcgcctctcctcctccaaaggaatgcagctcctcaccagcaatggaacaaagctgcatggacaatgactttgacgagttgagagaagaaggcttcagatgatcaaactactccaagctacaggaggaaattcgaaccaatggcaaagaagttaaaagctttgaaaaaaaattagacaaatggataactagaataaccaatggagaaaagtccttaagggacctaatggagctgaaaaccaaggcacgagagctacgtgacgaatgcagaagcctcagtagccaatgcgatcaactggaagaaagggtatcagtgatggaagatgaaatgaatgaaatgaagcgagaagagaagtttagagaaaaaagaataaaaagaaacaaacaaagcctccaagacttatggcagtatgtggaaagaccaaatctacgtctgattgatttacctgaaagtgacggggagaatggaaccaagttggaaaacactctgcaggatattatccaggagaacttccccaatctagcaaggcagaccaacattcaaattcaggaaatacagagaatgccacaaagatactcctcgagaagagcaactccaagacacataattgtcagatgaaccaaagttggaatgaaggaaaaaatgatcagggtagccagagagaaaggtcaggttacccacaaagggaaacccatcagactaacagctgatctcttggcagaaactctacaagccagaagagagtgggggccaatattcaacattcttaaagaaaagaattttcaacccagaatttcatatccagccaaactaagcttcataagtgaaggagaaataaaatactttacagacaagcaaatgctgagagattttgtcaccaccaggcctgccctacaagagctcctgaaggaagcactaaacatggaaaggaacaaccagtaccagctgctgcaaaaacatgccaaattgtaaaaaccatcaaggctaggaagaaactgcatcaactaatgagcaaaataaccagctaacatcattatgacaagatcaaattcacacataacaatattaactttaaatgtaaatgggctaaattctccaattaaaagacacagactggcaaattggataaagagtcaagacccatcagtgtgctgtattcaggaaacccatctcacatgcagagacacacataggctcaaaataaagggatggaggaagatctaccaagcaaatggaaaacaaaaaaaggcagggattgcaatcctagtcactgataaaacagactttaaaccaacaaagatcaaaagagacaaagaaggccattacataaagggaaagggatcaatgcaacaagaagagctaactatcctaaatatatatgcgcccagtacaggagtacccagattcataaagtaagtccttaatgacctacaaaaagacttaagactcccacacaataataatgggagactttaacaccccactgtcaacattagacagataaacaagacagaaagttaacaaggatatccaggaattgaactcagctctgcaccaagcggaccttgtagacatctacagaactctccaccccaaatcaacagaatatacattcttttcagtaccacaccacacctattccaaaattgaccacatagatggaagtaaagcactcctcagcaaatgtaaaagaacagaaattataacaaactgtctctcagaccacagtgcaagcaaactagaactcaggattaagaaactcactcaaaaccactcaactacatggaaactgaacaaccttctcctgaatgactacttggtgcacatcaaaatgaaggcagaaataaagatgttctttgaaaccaacgagaacaaaaacacaacataccagaatctctgggacacattcaaagcagtgtgtagagggaaatttatagcactaaatgcccacaagagaaagcaggaaagatataaaattgacatcctaacaccacaattaaaagaattagaaaagcaagagcaaacacattcaaaagctagcagaaggcaaaaaataactaagatcagagcagaactgaaggaaatagagacacaaaaaacccttcaaaaaattaatgaatccgggagttgctttttgaaaagatcaacgaaattgatagaccgttagcaagactaataaagaagaaaagagagaagaatcaaatagacgcaataaaaaatgatgaaggggctatcatcaccgatcccacagaaatacaaactaccatcagagaatactacaaacacctctacacaaataaactagaaaatctagaagaaatggataaatttcttgacacatacatcctcccaagactaaaccaggaagttgaatctctgaatagaccaatcacaggctctcaaattgaggcaataatcaatagcttaccaaccaaaaaaagtccaggaccagatggattcacagccgaattctaccagaggtacaaagaggagctgatatcactccttctgaaattattccaatcaatagtaaaagagggaatcctccctaactcattttatgaggccagcatcatcctgataccaaagcctggcagagacacaaccaaaaaagagaattttagaccaatatccttgataaacatcaatacaaaaattctcaataaaatactggcaaaccgaatccagcagcacatcaaaaagcttatccaccatgatcaagtgggcttcatccctggaatgcaaggctggttcaacatatgcaaatcaataaatgtaatccagcatataaacagaaccaaagacaaaaaccacatgattatctcaatagatgcagaaaaagcctttgacaaaattcaacaacccttcatgctaaaaactctcaataaattaggtattgataggacgtatctcaaaataataagagctatctatgacaaacccacaaccaatatcatactgaatgggcaaaaactcgaagcattccctttgaaaacaggcacaagacagggatgccctctctcaccattcctattcaacatagtcttggaaattctggccagggcaatcaggcaggagaaggaaataaagggtattcaattaggaaaagaggaagtcaaattgtccctgtttgcagatgacatgattgtatatctagaaaaccccatcgtctcagcccaaaatctcctcaggctgataagcaacttcagcaaagtctcaggatacaaaatcaatgtacaaaagtcacaagcattcttatacaccaataacagacaaacagagagccaaatcatgagtgaactcccattcacaattgcttcaaagagaataaaatacctaggaatccaacttataagggatgtgaaggacctcttcaaggagaactacaaaccactgctcaatgaaataaaagaggacacaaacaaatggaagaacattccatgcttatggataggaagaatcaatatcatgaaaatggccatactgcccaaggtaatttatagattcaatgccatccccatcaagctaccaatgactttcttcacagaattggaaaaaactactttaaagttcatatggaaccaaaaaagagcctgcatcgccaagtcaatcctaagccaaaagaaagctggaggcatcacgctacctgacttcaaactatactacaagtctacagtaaccaaaacagcatggtactggtaccaaaacagagatatagatcaatggaacagaacagagccctcagaaataatgctgcatatctacaactatctcatctttgacaaacctgacagaaacaagcaatggggaaaggattccctatttaataaatggtgctgggaaaactggctagccatatgtggaaaactggctagccacatgtagaaagctgaaactggattccttccttacaccttatacaaaaatcaattcaagatggattaaagacttaaacgttagacctaaaaccataaaaaccctagaagaaaacctcagcattactattcaggacataggcatgggcaaggacttcatgtctaaaacaccaaaagcaatggcaacaaaagccaaaattgacaaatgggatctaattaaactaaagagcttctgcacatcaaaagaaactaccatcggagtgaacaggcaacctacagaacaggaaaaaatttttgcaacctactcatctgacaaagggctaatatctagaatctacaatgaactcaaacaaatttacaagaaaaaaacaaacaaccccatcaaaaagtgggcaaaggatatgaacagacacttctcaaaagaagacatttatgcagccaaaacacacgtgaaaaaatgctcaccatcactggccatcagagaaatgcaaatcaaaaccacaatgagataccatctcacaccagttagaatggcaatcattaaaaagtcaggaaacaacaggtgctggagaggatgtggagaaataggaacacttttacactgttggtgggactgtaaactagttcaaccattgtggaagtcagtgtcacgattcctcagagatcttgaactagaaataccatttgacccagccatcccataatccaaaggattataaatcatgctgccataaagacacatgcacacatatgtttatatcgtcaatattcacaatagcaaagacttggaaccaacctaaatgtccaacaacgatagactggattaagaaaatgtggaacatacacaccatggaatactatgcagccataaaaaatgatgagttcatgtcctttgtagggacatcaatgaaactggaaaccatcattctcagcaagctatcgcaaggacaaaaaaccaaacatcgcatgttctcactcatagatgggaattgaacaatgagaacacatggacacaggaaggagaacatcacactctggggactgttgtggggtggggggaggggggagggatagcattaggagatatacctaatgttaaatgacgagttaatgggtgcagcacaccaacatggcacatgtatacatatgtaacaaacctgcacgttgtgcacacgtaccctaaaacttaaagtataataataataaaataaaataaaataaaaaataaaaatataaaaaaagcaccatccatgcaaattttattccatcacagagattaatgaaaagaaatggtcctactagcattttatcaagggctacttgtggactgtatactatattgatactttgaatttgttttttttttttttttttttttttgcatggacagatgaacctttatttaaaaaaatagcacttcaaataaattaaaagggacaaccgtcaagtgttcaaattgtgaagaaatagttgaaaacctagagggactccaagctgcagtcttctaacctcattctttgtccaatggcaaaaacccacacatctcagtattcccactcaattttttccctactgagatgagggaagcaattgcaaacaggagaccagacgaaggagaaagctgcatctgattggaatgaacattgccacgtacttgctaatacgggtttcactttatgaccaaatgtattctttcaaaaataaaaaagaggagagggaagctgcatgtttttaaaaattgaaattatttagggaaaaaacactaactctagtgcctttaacgggcaatagcaacttttttcctccgaagtcaaacaccatccccagctgagcctttgtgctacaagcttttcaggagatgttacctaaactttattaaaagaaaagaacaagtttaaatacagacactggactagcccagtctgtattttcaagtccacattcttcatctgaatcagggacccccctgagtctgcatgttttcaagttcacagtacatggaaccagtttttccttttaattttttcctcactcagagcagccacacacagtggccgttgacgctggaacctcgggcggggccttttcctacaaggcctggccggagctgcccaaggtttctcctcaatgagaatcgatgctgtcatgctctatggatgggaaaaaagcaagaaaatagaagcacctggtacaggtttcatcagatccattcggattcgctatgttccaaacccgctgctgaacgccatttgtccactttgtgtgtgttgaacagtttgtggccttggagtcagtctcaattagaagaactgttattggacgccccagaggttgatgcaatagcagctccagcagggctactcgtagagactgacttttggatgtgaggcaacaagtagggatcacaggccagctgctggacatcaatgcggtcctcctttcggtaggccaagcatcgtcgaatcaacgcctttgcttcaggtgttactaccggctttggcgggaactgcacttcagtagctttaagaatcgtattctcttgtaggatgtcttgctgagactggttatggccaaaaggcttccttccataaagacactgatagaagatcacacccaccgaccacacatcaactttatttgagatctttggtggttctttcccaaccacaaaacactctggtggtaaataccaataagtaccagcaccttgtgatgttagctccatgccatccactgaattgtagctatcatcatccatgatcttcgaaagaccaaaatctgtaatttttatctctccacaccctgtaccattttctaaaagaatattacctggtttgaggtcatagtgtatgatgggaggttttatttcatttaagtactttaaagcattcacaatctgcatgataatggaccgggcctctttctctgacattaatttgtgctgtttcaggtagaagtccagatcatttccctcacagtattctaatactgtacaaaacgagtcagtatccagtgaaaagtaatcatacagcttaactattctgggatggtccagctctttatgaatccggtattccctacatgcatgcttgtggtaattctcctttttctcatctctccagtttttatttaactggtgaattttcacagctacgtatctttgctctgttagatcaaatgccttgtaaacttcactgaaacctcctctacccaaaagatgtaacaacaaatatctgtcatttagcgttggatgatatttaaattgtgaattatcttcattatgtatcctttttacttccctgatatgtagttttctaaccctttctagcctctccagctctgcctggatctctgcttcctcctttttaagatgacctaatctgagtttgaagatttcttcttgttcatggtattcttttaacgttaacgtttcattttcagctccattggtcttgcttttccactgtttctgctcattggttgcaggaggggcctgacccatggcaggaggtttccgctttgctaacattttccgttgtctttctatctcttccctctgtgaatttatcctttcctgttgcttgataagattctgaaaagcataaccatctgtccactgctcagtaaatttggctccgtgtcggacgtagtaaagtagcccagtctcaagcggtcttgcatgctcttatctctacacgccatcttctcttgttttgacttttctataaggagtttcttgctcattgtcacacatctatttaatcgttccttgtatttctctagcatcttttgctgttcatcaatctgccgtctcaaatcacagatggctcttaataaatcatctattcttccctccttcttctctaagtcagaattcttactgttttctagtgcagatattttttctattgtgaggtcggactgggtctgtctgtgctggatggagatctgtttttgggagctgcaggaatgctctgtgttgccagatcccgtagatgagggactgttttgctgagctgaaacaaaagtgaagcagaggccagctcccctttgcgccagctgctctgtgtcaagccgaggttttgctagcatcactgacatgagggttggcagagcagactgctcctccgttgcctcctttgcagcactgccatctaaaccatagaggggctgttctactcgtcgcggtaagggattggataaggaatgttgcagtgaggatcgtgcaactggtggaacacttctgccagggctggttcccggcccgcttcccccagcaaactcaaagtaatcactaattttatgtcccctaggagtgcctttcccttggctactttcatatggttcagcttttcttttccgatttcgctggtcattctgctttttcttgggagtctctacttctttatcactcaaggatccgacgctgcacaagctctggttggaagactcactattaagtggtcccttactaacacctactccagtaaacctggcctccaataatttctgccgtcgtgggtccaggctatgcaattcttccatcatttctactgccgccgccgccgctgccgctccacgctcctccctggagggaccccgacccgacccggctgcggaccgctccgctctccccctgggcaggcccggggcggagccggggcctctcctgagcgccgcaaccccccgcccgggcagccaccgccggcgccgggctccacgagagggcgggcgggggagggggggcacgaaggccgcagatccccgggctcgcgtacagagccaggcgcccgacgcggccccgggcccgggcggccacgggaccggcctcctggcgccggacaaaggccaagggaggcgcaggagggcccaggccaggtcaggaggtgggggcccgctcggctgggggccactcgggtgcggcgcggagggcgggggtgtcggaaccgctggtgcccaggacctgcctccggccccttaatccggatcggttcggtccggattagtagtgatcggtgtaaacacactagtgaaaccgcgtgtttcctcgcgagatttgcacggctgggaggcagggggggtcctggggggtgggggaagcgccgacagtgggggaggagggggaggggacgaggaaggtggggggggtccccgctgccccctgaatttgtttattcacttaatcatcctgccaattttatatgggaaccatctacctattacagaggcagaaagtaagggttagacagggtagggtgacttgcacaagctaacagtgctgccaggtgagagagtcatcattgttgggcttcacagcctgagtcctcttcattgcatggtgctgcaggtgacagccatgggcctggaactgcttcaagggtagtttccagtgtcctcacctctccccttccccagcctcacctctcacatttccagaattagccagttcctattattactgaagcaatagttaagtttgagggaaaaacaccaaatataactacagtaacaaaatataataagagttaacatcattaactagtcatcatgcaattgccacaactatcctaggaggaagctattaccgttttgatcattttacaaatgatggaacagagtatcagggagattaagtaatttgcacagggacacacaaccactccaagaaaagatggagatccaaatgttgctcttttcaagaggcagctcagcttaatggggaagtgggaaagcatatatctcaacaaggagaaataccaaatgggtctaccatatgcaaagcacagtgctatgctctggagggggatgcaaaaatgagtaaaggagcatatggttctctgctgagaaagagaaggctctcacaacacaagagttgaacttgggcaaaagacagtagggttccacattaccgatgtgactactggaaattctttcccaactatcctgggtcggaggcagaagaagagactggttggagagcccaggagagcctctgaacattaagccaacagtcttgaatcatgacaagagcctctccacagagtcctcaaatgcacttctattcaatcactcagatttttcttctttgagcatctaagaggcaatatgatcaaagggagacaaggtcgtgaaatagaaagaatgataactttgacatcaaacttgttataaactccacctccccttattataagctccgagaccttgggaaattgcatatttccctgaggctcacttccctagctgtcacttgtggatattaactcctcatatggtgtcagagaagtaaatactataacaaatgtagaaatacatagcacacactaaccctcaaaccaagttagttcttcccccctctcagtggggctaacacttggtgtgaggtgctggcaaagaaacaaagacttttaatgcttgttatcgctttctagaagcttagaatttagttgggattcaggagacagggactagcagaagaaaacacatactgcaatctcctaagtagtctttcacctttaatattcctccctctgatccatcctgtggagtaccctttagtaacacaaacctgatcatgtcccttatgaccaaggaattattctgctaggcatatccccaacagaaatatgtccatatgttcatcaaaagacaggaaaatttgctcaacatcattctcattagagaattgtaggacaaactcacacgaagattccactgcacacttactagaatgttttaaatccagaggacaagcttttgataagtatgtagagcactataatcctcatatgctgctggtgggaatataaaatggtacaaccactttggaatccaatttagcagtttcttaaaaatgtaaacaaccacttattatatgacacagccctttcacctcacatatttacctaataaaaatggaagcatatgtccccccaaaacttatatatgaatatttaaaacagctttatgtgtaataacccacaactggtaacaacccaaacatccatcaacatgtgaatgataaacaatagaatactactcaacaataaaaaagaacaaataattacatacataaacaggaataaatttcaaaagtaattatcccgagtaaaagaatccagtctaaaaacagcacacgttgtatgattccatccacataatattctagaaaatgcaaattagtatctagtaagggaaatccaatcagtggaaggctggagacagtggtaaggtgtgggaaggacaggagggaggaatgacaaaaggacagaagaaaacattgatggggactatgaatttgttctctatcttgattgctgtgatggtttcatccatatatatccgaacttatcaaattgtataatttgggatagcacttggtttgagctgttgcggagaaagagttttagtactttttattgctttttaggaacttataatttagttgagatttagtttattagcaatttatgccaattataatacaataaagctattttaaggacatgcattggaatgtttacaacagctttattcataatagcctcgaactagaaacagtataaatgttcttcaacagtaaaataaataaatgttgatttatatatttgcagaatactatatagcaatgacaataaacaaactgcagttacatacagcaacatggatgattgtcacaaacataaagctgagcaaaataagttagacacaaaagaatacatagtgcatgattttacatgcagaaggatgaaaatatacatgaaataaacccatggtgttagaaattaagagagcattgacttttagggaagaaggaagggcatggtggcagggtaggatgggagctccagggatgctggtgatgcggtattccctggttctggtgattcatttatggtggtatcctcttatcataatgcactaaactgtaaacttgtgaattttctatttttctatatgtatgctgtgctttagtaaataggtttattttttaaaggttattacatggtatgtgataaaaggcagcattgattgtggctaaacaaatgccttaaatggaggggggatgggaagcagtaacattattaggaggaagagcaaaagaggtctaaggctgtgtagccaggagtagatgcctaggcacttttggtttgacagacatttttctattcctacaatgcaaaatgatttcaaatatataaattttaaaaccttccatttgtttagtgctttagaatttatagtttgcatggtcacaattctgcaaggataagaactctgttaatccatgcagaaagtagacattcagcaaatgtttacttgagtgaatttaaaacacttttaccttcactaatttaatgatttctcacaagtgttctgtagatgagcagggtgagggttattagtttcttttcatagaggggaaaaccaaagcccctaggagctgaggcctcctgcagatgggggcaatggactgggtgtgttttgaatcctggctggtggcctttgagctctgtgaccttggacagggctggaaccaagagtgcaattccctgccttcagctgcagtctccctccctggcccagtcatgaaagcaaaaatgggtcaagttctaattccctgatggagaggcacacaatacaaaattggtgacctttactattccaaaggcatgcataccctccctgttgaggacacacaaagatgcaacaaattatctttgtttttatggataaaacagctcatacaaaataaaagtgggccatacccttgaatcacacacacacacacacacacacacgcacgcacacacacacacacacaccaagaagaaggcctgaagggacagcagccaatccctttggaagaactgagggctgtgttgccagaggatgcccaggtagaagctaagtcatgctgtccctggtgaaaaattgcttagcgtaattatatccccagagaatgcaggcttccagatgggccccagagcatcctttacatacagtattttaggccaataacatgattctaatgaagtaggaaggaagaacaagaataataaaattaaaaagtcaaattttcatccttaatctcgagggctgcaaataggatgcggctgtggttcagaagcagagaacggagaggtgggggaagaagcccattttgaaagcggccaggcgttcctaaaatggtccatgacaagggtgaactttaatctcaatttctgcagcttgacccacatccccttggaggaggacagaacttttcaatgaggaggcacctagaggaggatcagaaaagtaaataccaaattcgtctgtttctccatctctcttccacttgagaagtcctcagaggatgtggcctttagtggacgtgtttgtctggagttgaaggaacggtgcctggggatgagtccaggagccctggttggagactttccagcaggcacatcctctcatctgcagtgtcctgctgatgaagacttcacattcctcttgggctgcccctcatcatcttggcatcccatggttcaaatgcctctggaagactattacttggagttactctgatttatttattcagcgtcttctctgagacacatactaagtgtccaaagatgaacaaaactgttttctgcctctgtcctcagtgagctcacagtcgaacacaggaagttggatgaggaaaatgattcctaggtgtggtgagtccttccatagagggacgtgcttaatgagaccaggggttgggaggaatgtggacgtggcaccatctaccctttccttccagatcctgagaacctgtgcaggcctgtgcctggcaccatcacagcaaacaatcctgcctagcatccaaaaagactccaccactcttcccctccatcccctcttctttaccaacacaggtagtaatattcccaaagcacatcctccccatccccatgtaaggcaaactaaaatactacccatgggcaatgtgagccagagttatgccagggaacaagacaagttccacagtagctacttctacacgaattaacactcttaaaagaagataattaaagctgtagtcttctttgaaactgggagcccctaatctctcttctacctgctgagactataccaggaattccacctttgggttcaatgattttcagtctttcccaagaagattaatggaaaaacttcaagaccactgaccaaggcctcaggaagtgtaggctgcatccccactgctactgtctgtctatatgactttcggcaagttactttccctgcatggacttctgtttagtcttctgcagaatgaagggattaaagagttgttttatgttcagaagaggtgaggccttaagggtcataaagtaacacatcgacaaagactagtttacctctggctgaaagcaaaattggtcctgcaggagagaagggcaggaagaagaaaactggggtagttcctacacaaacaaggtcactgacaatttcttataaccctgtatacagacaccattcctcgcattaaaagattaaatgagtctctttccctcaaaactaggctgccttgcaaattgctttgctcaatggaatatggaggtagtatcaccatgccagtttagagtatagggttttggggaccagaaaactcccacttttgccctcttggagtcctgcaccacaatgtcaagaggcctgaccaccctgctagagagaccaaatggggtgccagagatgcctttttagtttcccactgtttcagccatctctctgctggggcatcaagcatgtgaatgaaaccatattgaattttcagccctagttgagctccagatgtttacagtcacatgaccaggtaagatgagcagaagaactttccagctgagccctaaccaatttaccaatttgcgagcaaataaatagttgttatgttgagccactaagtgtttggactggtttattacgaagcaacagataaccaaaacaggtgccagaggtaaatgttataagtgacaaccttacaaaggctggtgactatagttagaggtttggattagggttaggagctttgggttgtgcaatagtacttgagagaaattgatcattgaaaatttatttgttaaaaagacatttcattttcatgggatatgttgtcacaggaattaatcaatgctggctggccaagcccatgcagatgaccttctgccaaggactggaagccagcttggttccaaacatggaggaggtaagatttttatccataaattcccaacttatttccatgctgccctcctcccacaccagtacctaccccaactctcactcaaaggactagagatgaaaaaccatggaaacgaatggctttgtatagtactgaatgggaaacatagcagctgggacttagaaaagcaaaagctgttatgttgttaataacatttttatgggtgattttgttgtctttgattgtaaaagaagagtaatacaagctccagtttgttctttcaggcctggggggtaggcttcccttatagaactccctgtctgttagatttactcccagctgaaccacatataccttcaatcctctccctcccaatactaatcacaagagctaccaatttttgagaactctccatgccagccattgggctacagaacttatttatgctatctcatttagtccttaaaatgaacctttgaggacatactattcccatctttatagattagaaaactaaaggtcagaggtattcattaatgtcttatacctaataaatggtacagctgatatttaaagtgaggtctgcaaggccccaaagaccatgcacttaaccatttctccaaacagaatacagctcccattaccagggctacccattcacacatacatacgtgtatgtattcaacatattcatttattcaacatatatataatgagcacctactttgtgaagtaacaaatcatacattaatgaacaagacagatatcatctcaaccttcatgaagcctacagattcctaccgtgacattcaccataaaccctcatttcacaatgtcccaaaaccccctttcatattttaacctcccagcccttcatccctacttctagccatgattctaatattctataacatggctctgactttgatctttgctattcttaacatgatgtacacctttctccagaaaaaaaaaaaaaaaaaaaaaaaaagactggagtatattgattacaccaatgggccaaatttcccacccctgattatatccatgccctttgcggcatgactttgtggttctttccacaaagtgttggaatctttccattccctgaatctgggctgttctgctgacttgctgtgaccaatggaatgctgcagaagtgacaatgtgccagttctgagcctgtgtctcaagagctttgaatgcatgggctcactctctggtacctctgcctccactgtgagactgcagccctcataagtcagtcaatattctaggaactgaagataaacttgtaaaagaaacaagcatggtccccactcggacaaagtttacaccctagtaaatcaataaatcataaatgagaatcctggatttgccaggtcagaaggaaacattatacaacctcaaataatgcttaaactccacaccatatcctcaatagggctttggaccctttcaaaaacagggagctcattatgagctaacacaacagttccagtttttgatggaacactcttggagagatttttcttctagtgaacggaagcccatccattgggagtgtccacactttgatttatggatatttctcagggccacacacagcatgtctaactgcctgtgtgttctgagttctctcacttctaggatacatcttcttcattctcttagctatttctaaatgtcatgactttgagaccccttgccattctctctcctgaacatgctaccttatttttctacattcttctaaaatttggttcggagaaataaactcaaaacttaccaacttcttgtactacattcctcttggtgcttcagattccttcattttaaattaaagaagttgaactcggtagcttgcaaggaaagatagtagattgcaatggaatgaatcctagatgctcaacagcctctctctgctctgctttattttcagcactgctgctgaagctgcctatctgcctatcatctcccaaaccatctttacctgtaaagtcctattgtgcagtaaagagacttgaaatcagaagaactggttctgaatcccagttctggcactttacagctaaacgaccttggacatattacataactgctctatctcaatttctttatccataaatctagaccatcactcctttctttccagctcacaagaattgtgtaggttacaagagagggcatggcgtgctatgtgtgaacacagtcttccatcggatgttgtgcagataagagatggtatgttggtgctgtcgtgggaactatagaccagcaacatagtgaacaccattctatttatgaaatatatttattgattgacttgggggctctgcttctctgtgaaaattaaatatgattttaataattccagagaacagactgtgcggtaataatcgtccctcctgatgggtatatcatgttttgtgatgttctgaggtaagaatgacatttaggaatatgttgtggtgcccaggagcagtagctcacatctgtaatcccagtactttgggaggatgagagaagaggatcacttgagcccaggagttcaagactagccagggcaacatagactgtccctacaaaaaaattaaaaattagccaagtgtggcggtgcatgcctgtggtcccaggtgctgaggaggctaatgtgggaggatcacttgagcccaggagatcgaggccacagtgaaccatggattgtgtcactgcactcctcccttgggcaacagagcaagaccctgtctcaaaacaaacaaacaaacaaacaagaaatatgttgtaggcaatagtcctggaaggggaaactccaggatggtagaagagccctcctgagttgaactaaggtccaaatggcccaaggttctgtcttgtcccgttccaggaacaggctgcattccctgctgcacatctcacccttctcctgcccacccaccacactgctctcacattgtccttctctgcttccacctctccttggctccaaactcctccatgatcaagcccatcctccccagtggggctcatgaacaccttggtcactctggcttcccacctcccagtcagatccaatggtcatgcacttctaaactccatcctttatcaaaacccactgtaatatttcacatctgcatgatataaaacatgcagttcctttcaactcaaagtccctctctctgcctctattcatctgatcaattctacttaccctttgaaacttcaaaacccttcagagaatcttcctccgacaggaatcccaagctgataatctccagcaaacctgctccacggtggtaattactctctcctctgtgttcatgttggaccttcaataaaccctgtttctcacatattgaaattctctgtttacctgcctgactcctcaactgtgagagcagagttgagtccccaactatttctgagtctccagcaacaagcatggtttggcacatggaaaatgtttgaaacagattagaagaaggtatgagtatatcaaataagcaaagatactggaatgattttgcataacaatattatactctgatccccatcccaaaactgagcaccattatctttccacatgcctgaaccttgggaggcaaagaatagcccaagaagaaaacagagaaaatataacacagtccatcttctctcatgagacaagagtttatgattgccaggaaatgtgtaaattgcagcagagattatttgtcaccacttcgtgaaagggcagaaaacggagctattttttacaacttcaaaagcatgcacaggttggggctactgcagtggaaatgccaggtctgttatatgcagatacattgaggtggcaaaaagacctgcttctctggggggtggggaggggatgtgaaggctggcacggttactcataaagctgcctggctgcacaagattcttgaaaaatctcttcccacttaatcagaatatcagaatcacagaactcaaagatcagggtcctgtgaacatgttctgtattggagaatttctgtccgtttatggattttaatcctctaaaaactgatatctatttttagtttccatctcattaaatacaaaagaccttcattgaacatctactctgtgcttgatgaaaggaagaagcaactctgaatacatcacccgaacctcaagcagcttatagaccacataggagcatgtgtaagttgtgttcacaatcacacaaccactttaatgcagagcaaaagatgataaatgagaaattcaaaatgttgtgagcactcagaggaagacaaaaggagcactttggaaggatgaggccaagatgtggatggccagggtttcagctctagtacccagctcctcactatttccaggaaaggacagcctgcagatgcctgaatgcctgcatgaccacttcagatgaaatgggttgtgattgaggcttgcagataggtgtttatttccatgaatcaaacctgctctctctgctgctgatctggagaaagaaacacttccagacttaagattctttattgtgcaattgctttcctgcaactcttgggtgtaggttggtttgtccagaaatgccaaattccagagaacagcagagaaaaaagagtgattttgcttgatactagcaacatcacaactaatccctttctcaaacaagctcatggcagcaagcaaactggtgacgtgtgactcctctttaatcctcttagctcatctccctctagtgaatccaaatgttaccagtgccagggactagcatcctggagcagggctgtggtggaaaatgcacaggatctgttctcggaacacttgggtgggtccttagctctaccactttcagctgtgcacctttgggttagccgcaacctccctcagcctgcctcaattccctcacctgtaaaattggattggtgatctggggatcagagtagaaaatgtgtatgaaattgccttattaattgcaaagataagtcaggactatcagttattttcaaattgtgcatatccacccttcttaaaaggcctggtgcccttctgaatgggcatggaggttcatgcctcctttgcttttggatttcctcaacctcacacaaggtctgacatttaatgagcacctcagtgcattcttgttagattaataagtgaacaaattgcaacatgttaccctggaggttaaggcttctgtcttccttccaagctgaaaggtaaagagagaaaaattaatttacaaaatgtttggaatcatcagcatgaattctaaaataattagaattttctgaacacacacacacacacacacacacacacatacacacacacagagagagagagagagcgagagagcgagagagcgagagagtgagttttttccttctggtagctggaagtctacattaaatttgaagaacatcttgccctaaaatggtttggctcctggttatgtgaatatattttgcttagcactaagggaatagagatggattagtaggtcagatacttggttctcattcttgattgattcatccactctttcatccatccatccatccctccatccatccactcattcattcattcactcactggcaacaatttgttccaaagcactgactgtgtgaaagctcagcctcattacaagatgaaaaatgttggagcagcattttggctgacaaaccaccactgatccttccagaccttattgcccctgagccaagaaacatttgaaatcgtactactgcccccacatacggcatttagtgccacctcttatcttcagtttgatagtttcagggaccaaaatgctgagactttctccctttagataacattcctgtgactgggatatattgccaccggaatcctccaaaaatcccatctccgaaaagactgttcatggcaagtgggagtctacacggagaatggcgacgattactttggactgtagaacatgtgactggactgtatacatgctgcacttattgcctccccaccatccttccaccctctttctgtggctgtacccaacacaactgctctgtcttcctcatccctagtaaataaccctgcctatgaatctcactttttttttttttttgagatggagtttagctcttgttgcccaggctggagtgcaatggcgtgatcaaggctcactgcaacctctgcctcccgggttcaagcgattctgctgccttagtctcccaagtagctgggattacagatgcttgccatcatgcccagctattttttttgtatttttagtagagatgggatttcactatgttggccaggctggtctcaaactcctgacctcaggtgatccacccgcctcgccctcccaaagtgctggggttacaagtgtgagccaccatgcccagccaaatctcacttttccatccctcatcttttctcccttctccttccttccaccctcctttcctctgactattccaattttatacttagttctcatgcaccagacctaggcttggagggataaaatctcttctgcagtgcttgctgttccaagctgctcaccacatcctctgccctttattccactcccttcatgttccaaccactgatcaacccctaagaaaaaaaacaaaacatttccttcttatgctttatgcctccaaattttgttctccctgggttgctgcctctctctcaggctggcggctccattgttattatgatcgtatattaagtttaatgcgtccacaggcattttacacactcataaaagtcaggccctctaagagctccctgtgctgaagacactggaaatgctctcccaggccttagtgccattatggcctctgtgcaaagctgggtgggtggtggctgtttattgttgtctttgtaactcttgatgataaatacagcattttgaaaaagatcaaatcatttcccaggttataagcagagctgaagtgattacttccatatgggcaacatcccacagtattaaagatattaataataggtgacctttattgagtatatactatatgccacactgtgcactaaacatttttacatgcattagcccacataatctgcccaattaacctgtgtgacaggtaagatttaatttcaaataaacatttggtaataaaaggaaattgagagacagagaaattaggtactgagttcaagatcaaagagcatagaggtggaaaaactgggattattcaaactcaggatgtctggcttcaaagcccacctgcttaatcatatgcaggtactggcatttggaagaagtccatctttaaggtggaggaaaccaaatataggtgggactaattggcagatattgttggtgtgctcctctgtctatgaaagccatgcccagagtcttcctttctcagtccctgacaagactcaggtacctataagacctccattctgtacagggtttgtctttgttttccccagcataagagacaatggaaaacgagagcaaaggactcagaccagagcagaccttgtagagtgggagtcataagtaccgcaaacctgcacaagagatgaaagagcagtcaaccgtatgttcttttcatggaatactaactctgtaaataatcttgcatgtgctctagtccagtttcctaacaacaggtacatggattgattagccaaattattcccattgcttctctgtcataatcagtgttttcattacatgcgtccctttccctcattgctcttcattttcctcactcaagacatctatgagctacaatatcattttacctgggagacattgatgtcaatgaagtacgtttttgaagtacaaagctccaagaggctgttatttgtccagagccatgaaacatgttaatgcagagcttgaatttctacttcctggctcacagtatagtgcttttttcaagcaatgagtggagatgtatgggtaccctcctttcccagattacttccatcacaaggaccagctgctaaactcatactggtagcatcctacccagtaccagcctttctgaatagtctcccatagttccaattcacacatacacatttgccagatggtcttcaaaacatgccaaaatagttatcatgtcctacccgatatttgctccaactgcatcctcagtctcatgatctttaaatttactgctgaccatggtgctagtcagagcaacataaaaggacatgcttaacctcagggctgaaggagatgacataggtgaaggatagcactcactgatgcatagagactcagaaaacagaaaacaaggtgctgttctaggaatttagcataaaatggcaactgagagagacattatgcatgccttcatagtctgtcttctagtgaggagatagatgagcaagtaaccaaaatgtatctattgggagggcttcttgaagacttaaagcacaagaagaaaacaatcatgtgaagaatggaagaagagaggtccatccaaagaaatgactcatccaaaggccctgcatttggaaaaatcttggcatacttagctacctctcagagagtccagtgggactaaaggacaggaagacaggaggagagaggaagaggatataaagtggccagcagttagatggtgcaggaccatttaaatcataacatatagcacaggcttcactctgtctgcagtagaaagccattaaattggtttaagccacgaagagacacgattcgatttatatgttaaaataacatcttattatggaaaatttccaacatttacaaagtaatccaaataatataacgaaccttcatgtgtccatcacccagattcaacaaattatcaaaaatttcccattcctgcatcatttacagatcatttactccctgccctcccacttgtttactgtcttttttacagttttattttcctctttttgaggtaaaatttacttacaataaaatgtacaaatcctaattttgacaaatgaaactccgattgttatctcagaacatattcatcttcccagaaagttccttcttgtttcctcttaatcaatccctaccaattaacccccaagaaacaatgattgtgcttgcctttttatcttagttttgcttattctaaaagctcatattcatgaaatcacacggtattttcttgtgtcttttactcagcatgtttttaaaattcatttatgttgtgtgtgtcagtagtttgctttttaaaaactgattagtattccgttgtataaatatacaatatgtttgtcaattaacttgctgatggacatttggattgttcccaatttttggctaatgtaaataaacctgctatgaatgttgtacaattattgctgtagacatatgtttttgttattcttggctaaatacctaggagtagaattaatttacacgtttttaagcattgggaatagagtagagggggcagggatggtggcaagaaaagcagttaagaggctattacagtagttgagaaaagagactaggatgacttacactgggcagtaattgtagtaagactgtcaggggacagatttgaaatatatattgataaatacggtcaagaatatttgccagtgaattaaatgtgaggggtgagagaaatggaagaatggtctctagcttgaaaaactgggtgcctattaggatcttttactgcaattaagaaagtggaggaagaacaataatttaggcaacatccaaggatttccatttgcaatggctgaggcatggcagagtagacattaagcagacacatggagcctgcagcttgggaaagaggctgacccaccatcacctggcacacagcttctgcactgctcaggtcctgccttctccctaaaatacctcaacatcttgtggagggatggaaaatgggttttgttttatgaaccaattctggtaattggtaatagctacctgtgacactgtgcaaagaaagattctgagaccacattctgggctggtaggtaaggagtgctgtgagtggtaaagcatgtccttctggagcatggagtagcagtacaatggaaacaactcagatattttctatgcctgagaaaatagaagtccacaaccaaatcaacctaaaaagtgaagaatttgctgtggaataactaactaattaataatacagacagaagtccaaactgtgcaaatatacagattgacccatataggtcaatctatattatttacttctcaatttcaactcctctaccaaataacctactgattcagtatccttcaggtcctcagtaaatgcttctgacttttcacctgatctccaaattgcaaaaatcccaaaatatgctgagttcctcatcgttggctgggatcctctcatatcttgaggttaaacaacccattcgtgtgaaaacacagttcaaaggatttcaaacttttaaatacaatgatgaatcatttaaataccctgggggaaatgtcaaagagtggattagacagataatcaatgtataatagttgcctcgtcttttcattcccaactgaagccataggtgagttgttctcattattaataaaactatctattcattcatttattcattcattcatttaatcatcaaccttttgttgggcactaaatttatgccaggccccatacttggacctgagtagagagacaaataagtctatttacacatagagacatgtaaatgatcccaaggagagttagataccacattcctctgttaaatattccaaagacaagtgagagaaactcttcaggaggtagaaaagctaaactcagtcttgaaaaactattaaattaaaagtttctctgaaggaagtattgggaaaggatattctaaacagagaagccagcatgaacaggtctgaacatgggatggagcaactggtgggtgttaaagcccaaggagggtgtgattgaggaaatgggctgtcgcagtagaggtgtgagtgcctgtctgatgatgggacttggtgcaattatggctgcaatgggagtcattactggagctttagtaggaggacggatataatcagatatgtattttagaaagattttgtagtaatgtggtgactgcaggaggggaggaaatacaacagaaagaaaattgcaggcaggaagcaacaggaagtgaggaagtaaggaaaaagagggcgaggcacagaggcaagagggtcaaggattaggactgcgggttaggattagtgctagtgcttggcaatagaaactaaacagagaagaaggtagaagttcagactatgagagagtgcatgtagctgaaaatagaaacctcataatgtacctgtgcagggtactttggaaatgcctgtgatagaaccaaagtctgtctaactccaaagccaatactttccacattttcacactcccaggtagctttattcttgttcccacctcctcctgcagtagtaacaaacctccaagagcccatagtcccagacattttgacacctacacccatgtacttgtgtgcgtgcacaactctacctacctaaacacggtctaatcctacttatttttctctaaagcctaactcaactttctccttgtccaagaagacttgtcacagctccttacctgaaaattacatatttctaagtgctaacctctatatttactctcatctctttttacattttaccttatatctgagtcggttctgtacatgtcatcttctggctagacagtgagcttgctgaggctgcctatgtaagatgcacctccgagttttctttgagggttcaatgatactgaatgacataagcccttgctgcatgtgccacctcactgggtcatctcaccttccgaaccaagcttatcaacagtagattataaccaccttatagatgaagaaacagcctggaggaacagcccttgaatccagattttctcatttgttctcttatctctggtggtcctcattcccaggattacccactgtgaactggataccagggcttcatgggtaaagcatattattaaaacaaatgcttagctcagactttcattcctgtagcactagctgctcaattcaaagacaggtagcaggccttgaaacgctgtccttgaaacctccttctcttctttctcctcctagatcaactgactgtatggatctcagggaaatgtattagcatttcctcctacatatttagggaacagaaatgtggatccccgttttctttgtgggaatgcagatacttaagataggaggggaggggaggagagcagagctagctggtcttccagggactccatgaggtgacatcatgctcactgagcattttccatgtgccaaataccgcactaagcatgtcattttggttctcttcagataatctgctaggtaggtattatgacctatatttcatagaagaggaaagtgatgctaagtgatatgaaggaacttgttcaagttcataccaccagcaaatggcagaaccaagatttaacaattgtttagggatcatggcagacaggaggcaggactagattgcagctccggacagagcagcatgtggaggcttgcactgtagatttgagctctggatcaactgcaagaacaaactagcaatcccaagaggacccacagaccctctgaaggaagtggactgctcctgcaggacctgggagacaccccaaatactgtgagtgctctaactgcggaaatgaaaaagggagacccttctctcccaaacacacacccccactggagaggttgaaggtctgtttgtgggagaagcttctgactttacctgaagctgagtaaagttagagagctgagcaaaatacaggggtagaggaagcaacagaaagaccctgggtctctaagcagcccattcttgcctggcattacagggaaccatcaggagggtggcgagaggagcagagggtaaaactccacagggagaagaaattctctagctgagctttttaacaacttcagtggggtgagaagcctcctggccagaactcagggcagggcgcaaattgggcgtgcagacttcataggcaaggaaagaagtaaagcccttttcttttgcagctgggaggcagatagctttgggcaagttttcaagcccatctcaccctcctcctgcaaacagacttggtgctgctgtgggaggggcacggtgagaatgcgaccagccctttggttggcataggagctgggtgaggcctgtgactgccggctttcccctacttccctgacaacctgcgtgactcagcagaggcagccataatcctccccggtacacaactccagtgacctgggaatctcacccgcatcccccacagcagctgcagcaaaacccgcccaaggagagtttgagatcagacaggcctagccacgcccccacctgaaggttgttccctacccaccctggtagcaaaagacaaaggacatataatcttgggagttctagggccctgcccaccaccagacccctctctacactactacagctgatactttctggaaagtgccacctcctggcagggggccaaccagcacaaaaatagagcattaaaccaccaaagctaaggagtctcacagagtccattgcaccatctgccacctccaccagaacaggtgctggtatccacagttgagagacccatagatggttcacatcacaggaccctgtgcagacaacctgcagtaccagcctggagccaggtaggctcactgggtggctagacccagaagagagacaaccatcacttcagttctgctcagaggaagccacatccataggaaaaggggaagcgtactatatcaagggaatatcctgtgagaaaaaagaatctgaacaacagccttcagccctagatcttccccctgacagagcctatccaaatgagagggaatcagaaaatcaactctggtaatatgacaaaacaaggctcttcaacacctcccaaaaaatcacactagttcaccagcaatggatccaaaccaataagaaatccttgatttacgtgaaaaagaattcaggaggttagttattaagctaatcaggaagggaccagagaaaggtgaagcccaatccaaggaaataaaaaaaatgatacaagaagtgaagggagaaatattcaagggaatagatagcataaagaaaaaacaagcaaaaattcaggaaactttggacacacttttagaaatgcaaaatgctctggaaagcctcaacaatagaatttaacaagtagaagaaagaaattcagagctcaaagacaaggtcttcaaattaacccatttcaacaaagacaaagagaaaagaataagaaaatatgaacaaagcttccaaaaattctgggattatgttaaatgaccaaacctaagaataatcagtgttcctgaggaagaagagaaatctaaaagactggaaatatattttggggaataattgaggacaacttccctggccttgcgaaagacctagacacccaaatacaagaataacaaagaacacctgggaaattcatcacaaaaagatcttcgcctaggcacattgtcattaggttatccaaagttaagatgaaggaaagaatcttaagaactgtgagacataatcaccaggtaatctatgaaggaaaacctatcagattaacagcggatttctcagcagaaacccaacaaactagaagggatttgggacctatctttagcctcctcaaacaaaaccattatcagccaagaattgtgtacccagtgaaactaagcatcatatatgaaggaaagatacagtaattttcagacaaagaaatgtggagagaatttgccattaccaagccaccactacaataactgctaaaaggagctctaaatcttgaaacaaatcctggaaacacatcaaaacagaatctcttcaaagcataaatcacacgggacctataaaacagaaatacaagttaaaaagcaaaaacaaaagacaaaatacaaccaaagtacacaggcaacaaagagcatgatgaaagcaacggtacctcacatttcaacactaacattgaatgtaaatggcctaaatgctccacttaaaagatacagaaccacagaatggataagaactcaccaatcaactatctgctgcctttaggagactcacataacacaaaaggactcacataaacttaaagtaaaggggtggaaaaaggcatttcatgcaaatggataccaaaagtgaacacgggtagctattcttatatcagacaaaacaatctttgaagcaacagcagttgaaagagacaaagaaggacattatataatggtaaaaggccttgtacaacaagaaaatattacaatcctaaacatacacgcatctaacactgaagctcccaaatttataaaacaattacaactagacctaagaaatgagatagacagcaacacagtaatagtggggagcttccatcctccactgatagcactagacaggtcatcaagacagaaagtcagcaaggaaacaatggatttaaactataccttggaacaaatggacttagatatgtaccgaacatttcatccaacaaccatagaatacacattctattcgacagtgcatggaactttctccaagatagaccatataataggacataaaacgagcctcaataaatttaagaaaattgaaattatatcaagcactctttcaaaccacagtggaataaaactggaaatcaactccaaaaggaaccttcaaaaccatgcaaatacatggaaattaaataaccttctcctgaatgagcactggatcaaaaacaaaatcaagatggaaattaaaaaattcttcaaactgaatgacaataaatgacacagcctatcaaaacctttgggatgcagcaaaagtggcgttaagagcaaagttcatagccctaaatgcctacatcaaaaattctgaaagatcacaaacaatctaaggtctcacgttaaggaactagagaaagaagaacaaaccaaacccaaatccagtagaagaaagtaaataaccaagatcagagcagaactaaatgaaattgaaacaaaaaaagattacaaaagataaatgaaacaaaaagctggttctttgaaaagctaagaaaattgatagaccattagcaagattaaccaagaaaagaatagagtaaatccaaataatctcactaagaaatgaaaaagtatatattacaactgacaccactgaaatacaaaagatcatccaaggctactgtgaacacctttacgcacataaactagaaaacctagaagagacagataaattcctggaaaaatacaaccctcctagcttaaatcaggaagacttagataccctgaacagatcaaaaccagcagtgagattgaagtggtaattaaaaaattagcaacaaaaaataattcagtaccagacgaattcacaacagaattctacaagacattcaaagaagaattggtaccaatccttttgacactattccaccagacagagaaagaaggaaccctccttaattcattctgtgaaaccagcatcaccctaataccaaaaccaggaaaggacaaaatcaaaaaagaaaattacagaccgatatccttgatgaacatagatgctgaaatccttaacaaaatactagctaactgactccaacaacataccaaaaagagaatccaccattatcaagtgggtttcataccaggaatgcagggattttttaacatacacaagtctataaatgtgatacaccacataaacagaattaaaaacaaaaatcacatgatcatctcaatagatgcagaaaaagcattcaacaaaatccagcatcctttatgattaaaaccctcagcaaaatcagcatacaagggacataccttaatataataaaagccatctatgacaaacccacagtcaacataatactgaatgaggaaaagttgaaagcattccctctgagaactggaacaagccaaggatgcccactttcaccactcctcttcaacacagtactggaagtcctagccagagcaatcagacaagagaaagaaataaagggcatccaaatcagtaaagaggaagtcaaactgtcactatttgctgatgatatgatcgtttaccttgaaaaccctaaggactcctccagaaagctcctagaactgataaaagaactcagccaagtttccagatacaagattaatgtacacaaattagtagctcttctatacaccaacagcaaccaagcagagaaccaaatcaagaactcaaccccttttaaaatagctgcaaaaaataaataaataaaagacttaggaacatacctaacaaaggagtcgaaagacctctagaaggaaaactacaaaacactgctgaaataaatcacagacaacacaaacaaatggaaacacattccatgctcatggatgggtagaatcaatattgtgaaaatgaccatactgccaaaagcaatctaaaaattcagtgcaatccccctcagaataccaccatcattcttcacagaattagaagaaagtaattctaaaattcatatagaaccaaaaaagagctcacctagccaaagcaagactaagcaaaaagatcaaatctggaagcatcacactacctgatttcaaactatactataaggccatagtcaccaaaatagcatggtactggtataaaaataggcacatagaccaatggaacagaatagagaacccagaaataaacccaaatacttccagccaactgacctttaacaaagcaaacaaaaatataaagtggggaaaggacacccttttcaacaaatggtgctgggataattggctagccacctgtaggagaatgaaactggatcctcatctctcaccttatacaaaaatcaactcaagttggattaaggacttaaacctaagacctgaaactgtaagaattctagaaggtaatattggaacaacccttctagacattggcttagtcaaggatttcatgaccaaaaactcaaaagcaaacacaataaaaagagataaatagctgggacctaatcaaactaaagagctttttttttacagcaaaaggaacagtctggagagtaaacaggcaacccacagagtgggagagaatcttcacaatctatacatctgacaaataactaatatccagaatctacaacaaactcaaacaaatcaataagaaaaaaacaaacaatcccatcaaaaagtgggctaagggcatgaatagacaattctcaaaagaagatacacaaatgcccaacaaacatatgaaaaaatgctcaacatcactaatgatcagggaaatgcaaatcaaaaccacaatgtgataccaccttactcctacaagaatgaccataatcaaaaaataaaaaaacagtagatgttagcgtggatgcagtgaacagggaacacttccacatggctagtgggaatgtaaactagtacagccactataggaaacaatgtggagattctttaaagaactaaaagtagaactaccattggatccagcaatccccctactgggtatctatccagagaagaagtcattatttgaagaacatacttgcatatgcatgtttatagcagcacaattcacaactgcaaaatcatagaaccaacccaaatgcccatcaaacaaagactggataaagaaattgtggcatatatatgtgatggaatagtactcagccatgaaaaggaatgaattaacagcacttgtagtaagttggatgagattggagactattattctaggcgaagtaactcaggaatggaaaaccacacatcgtatgttctcactgatatgtaggagctaagctatgaggatgcaacggatgttggggacttagggggaagagtggaaggggagctagggataaaagactacaaatatggtgcagtgtatactgctcgggtgatatgtgcaccaaaatctcacaaattatcactaaagaacttactcatgtaaccaaataccacctgtaccccaataacttgtggaaaaattttaaaaaaataaaacatatttttttaaaaaagcaattttatctgtttccaaagcctatacacctttctttatgtggcttccaaaagtaaaaaagaccgctgaggggttgttattacaggctgctttctgcccagggcaaactttcacaactagaatgctgaaaggaaggaaggttttgcctacagtcttgatcattgcattctgaggaagagggacgtagatgaataagaggaaaacaggggcatgcaacaagttaaaaagtcaagcttaaggacaagagaagagtaatcaaaagggagaattataaaaagaattgcttggtttgactctgaaaggcctttctcccaagtggtaaaaataatgcttacagagtgttcatgatggccagcccctcttctaacacctttgcatcctagaaacttatttaatccaccaacactctcgagatagtattagaactgtccacaacaataggtgacaaaactgagggcacacagaggttaagtactatttttcccatggtcttacaggaactagattcgagaacaggaatttgagaccaggggcctgagtctcagttcacactcttaactaccggacatggtgcctttagaataactatgagtggggaaggcctgacttaaggagatgaaaatctctaatttgaggtccaagatccctacccttaaaggactgaagaagttcacaaaccatggagataacattgtgaccaacacaggcaatggtctggaaccactggttaattaagtcgttcatctctttgtgatctctctaagccactggttcctggccttaggtacacattagaaccacctggggagttcttacaaaatgctgctgcctgggcctcatgccagactgattgaattggaacctcttggggtgggtcctcagcatctatgtttttttaatgttctccaggtgatttctaatgtgccacctgggctgtgaaccactgatgcaggtaactgtggacgaggtcatcactgagtggagtgccaactctgcccagcagctgaaagcctttcacatggcctgcaaagacattctcacaaagcctcttcagcctgcaaacacctcaaggacaggcattatgtcccatacaattatttgggtattgtccatgacatctatcatgatgacagctgagtcatggagtcagaagctggctgggacctctccgctcattgtatccagtgtttttgaattccaggaacttacagaagggccaaagtggactgctttgggtggttgggcatggagatgtgagtcactggtttggtgaagtttccagggaactcgaaatcagagaaggtcagcaagaccacccaggaaacaacacacaatgtcttcagctcctcggacaggtgggattctttattatcaagctccagctctgagaaaagcccctgtgtctaacctcaaatctgagagaactaaagtgacggcactaccaatttagaactgcaagacggaacactgctgccctcaggcagctgccatgtcctcttctcctgggttatgtgagcacgtgtccgtctctcatactagactttaggaaccttcaagaataagcacattgtgtcacatttctttgtatttaatgccacacaaccacacacctattacacagtggaaaactaataaaggcttctttggtagaataaatactagggctgacattgcttgctctctgaagtcctttgtagtggtaagtgtttacacagaggcctgggcatgtacaagtatggacttcagatgaaagaaattgaaaaaagaatacaaatagctgatagatttgtgaaaagattcacatccttgctgaaatttaaaggaaagcaaatttttttaaaaatggaatttttttgacctatcaaactgacaaatgatttggatcagtaatactgatccagtaatactgaaggctaacaggagtgtggaaaagagactgttagtgagaacatgaattggaatagcttttttaaagggcttactgcatgacaattataagtatgaatactttggcccaataatttatttctaaaaaaactatcccaagaagattactggatacctgtacaaaatgctgtttatgatttttcaaatggaaataacttaactgtctttaaaaataggattgagtaaataaattggggtatacccacacaatagaatatgctactgttgtgaaggatgaggaaatctttaaatggctaacgtggaaagacatccatgatatgtttttaaatgaaaatcccagattacaaagtaacatgattaatatggtcaaatttttaccagaatgggaatctgtaatatacaatatggtatagcaatatatagatacacagatgatagacagatggataaatgaaattatcttcaaggataaacattatcctgttagtccagctgctgggtttatctgaagacatccatttactaccacacatacatctctattatttaatttctttaacaatctacattggttgcttgcttttacaatccaataaatctatttctgtttcaaaaggcagaccaagaagtggaggcattagtaaaagaggttacagtgttctgagtgaactctagcccaaatcgggtaggtgtggaggacagcctccacaatcctcttctcaacatttctttcttcgacactaaggtctttatgggcaggcaccattaatgtatgatggaaggaagaaaaggacagggaaggaagggaatgagagaaggggaccaggaatcagctttcggggtctgcctcgacttagggtttttctgggttacagggaaggactttcagtgctaatagaaaactcataggaaaatggggatgagttgatcaccttagcaggaggaagggagatgcctatctttccctggttcgataagctattataccttccaacagcccattctgcagcaaaagaattggcttctagatgtcaagaaagatggattccaatcccacctctgccactaaataactttgtgacctttagcaagccactcaccctcccagggtcttagctttttcctgtaaaacaatggagtggaaccaaatggtttgaaagtcccatgaagctctgtcactcagcactgaggcctctgtctagactctggcattcttccaatagtgtttcttatgagaatgttcattgtttcctgacagcagacctttagcgtttcaaaattaaagacaatgcctttctgttgatagatgccccaccccaggcctggcatggtattggactttcatgagttggctgtccagtgggccctcaggggagcaggtggtggctgtcttccctaactcactcctggacagtccaagtagggcccagcttggcaggaagaacttgattaatgtcaaaggcttttagtaagcaagtgaagcattttaactgggaggaaacaaaagcaatgagtgacaaacccattagccacgccactcaaagccaaatgaaaggaagaccacgatgtgctgaagctggctcccactgacacaggagagtgggctactcctacccctctgaactccactttcagtggtcaccttggtggctcgaaatgagccgtgatgggagtatttacactgcagaagctggcaaacgctaaaaatttaggatttatttctcccctccctcccttcccttccctccctccctccctctcttcctttccctcctttcttccctccttccctcccttattcctttccttttcctttcttcctttccttcttcctttctttccttcttccttccttcctttcttcctttcctctctttctttttctttcatttttttctttctttttctttctttctttcctttttttctctttctttttttccttctttctctttctttcttcctctcttttcttcatttctttctttttctttcagagagagagaaattaccagggcctatcactgactgagttagttcagggaaagaggaagctcctcccggccttgggctccttcttgaagatgcaggaacagcctcaagctgagctactgagcttgccctttcttgagtgaagacaagggagtccctccatccagggctaggcaagtgtcagaagtcaagtgatagaaggtgagaggaggagagggaggagaaagagggaagactaagcacatgttaacaggcctaatcaaaacattcaaacctctcttagccattcattggtcatctggggtggtagtgagttcaagtccaacatagcaggtgttcaggcaaccattttgcagaatgatatgaagacagagggaggctttgaaagtagaaaaagcatgaacgtttgagtaagagtggtttaggcttgaagcccaacctgaccataaaccgtctgcttgacctcaggtaaaattatttaatctccgtgactcagtgcccaaatttattccatggtgataatcaaaatttaattaatagaatttgtacatgcttggcccatagtaggtatactggctgagtagaatgtagtaactgaactataaaaaaagatatctgatacctgacacctgtatactttagagacagtttttcagcctgactatgaagttcgcaaagcaatctccacttttgatggacataaattcctcagtgactcttcacaatctctaagttaagctggtgcacgaacaagttttgccttcaaagtgaccataccaataaagcagtaccccctggtgatgtggtcttacagcccccagcagtcttcattcaggcctaatgggtactcaagcaagcagaagctgggatactgagtatcaggtttggggaagatgtgaggttctgcttgagaccttcaaaacttctatccatttgggtacatgattccccttccttcttgagccacaggtagctcatggtaccttctagaaactcagaggaggttaaaccccatggtctgggaacaaaaggtaaagacagaagtcagagctgggacttaacgtctctgttgctacattggggaaaagtttccaagtctctaccgaaaaaaagcaagagctggaggagaactccataggctccctgagtcccatgtagcatagagatacaagatggcctcatcaggactgggacacctgctcctacgaggaattgctgaccactctctcccacccccaccacatgggagaaaagaacagcaaggacaccaataaccctggtcataatggacccacaaacaggccacaagccaagagagtctgtgccatgtctccttgtgtgctaactccctgcatactccatgatacccaccttgttccataggtgctttcttaagctgggtactctgactccaagagaggtttagggacagcgccacagaggcagagtctgccctcccactcttacaaagctgatgatggatgagttggggattcttatctccactgctcgtagtccaaaacatgcccctctaattccatggcccagtcgtcaacagattccctgaaactccaagttctgaagctgtgggaagatatgacgtacttctcagaagtccagaagtcagtaggtccccttttggcttctcaagtgtgcacacacccttgttacatgcagcactctgagtgatgaattgtgattaggccagatatctccatacccctggacaatatgtagaatagagtagataagtgatatatccaggtattgagatagtctaggggccgcagggatgtaggcctagattccctgatctgtcccttggtcaattacataaccttgaggcatgtcactggctcttggtgggcctcatccttcccatatgtaacttctgtggattttatccatttctagtccaacacatccacttctcaccatctgcactgttctcttctgagaccatttttccagccctctaactggtctccctcatccactcaccttccctaccgatgatcagagaaaaaaatccaataaggacacttataaaagaagagggggcggggagatagaaggaagaaacgaatagaaaatcattacttagccgggctcggtggctcacgcctgtaatcccagcattttgggaggccaaggcaggtggatcacttgaggtcaggagttcgagaccagcctggccaacatggtgaaactctgtttctactaaaaatataaaacttaaccaggcatggtggtgtgcacctgtaatcctagctactggggaggctgaggcacaagaatcgcttgaaccaggtagatggaggttgcagtgagctgagatggtgccactgcactccagcctggacaacagagcgagactccatcaaaaaaaaaaaaatcattaagtatagtctcaaagacattttctagggagagaaagaaagattctggctaagaaaaaaagaatgtctaagtggaaggatgaaggttgtcttttttcttaaaagtcacatggcaggcgcaggctgacaacaggtggcgagaaacagcacagggtgggaagtgcagaagggcaggcactggccacgtaggctggggacagctgattcagggtgaaaatgaaagacaaagagcagctgtgctttgtgctgaaaggaagctagggggtttttgcagcagggcaggcatcggggcgagaagtcctttcccagtcagtagtgctggtgctgggctggggacgcgattgctgcatagctgtgagtctgcctcagcaccgctctgtgcatcgcagctctgcctccctctcaaggtgccaactcagtctccgtcgtgtggctcccagatggtccccatttcaatgctgagcccagctgttgcagcagcctgttaagaagaagggcattttggggcttgctgtgttgtttttaaaaaaccctgtgaagaaggctgtatttccccatattttatagataaggaaactgaggctagataaatttttaaggcggtacagttagaacgtggcaaagccagcatagagccagctgctagtgctttaaaaacttgaatttttaccccaggttctaaaagcaatatatccttataatgaaaaatatacaaactaataaaataacaaaatgaaagtcacccataaccctctacctagagatgaataaaagttgtgtatatttccttctagtctttttaattaattcctctgcatattatttttacttatttataaaagtgcaattatattataaaaaccattgcaaaaatcttcgcttcatgtgatggacgatttctctcaggcatttttatattcctgagaaactcattttatttgttacatagcaatacatcatagggctacaccataatttatttggtcttttttctactcttggacgtttaggtttcttcccactttgggggcttagtggataatttaagaaatgtttttttaactgtgcgtgccctggtactaaattttgtaatttcaaagagaggtcagcgtagacacatagagtcaatgagaaaaaatatacatggaaaaccattatgccaggtaacgtattcacagatcaaagaaccaggaggtgataggagaaaatgagatgaatgcaactcggtgggattccgcaaagttccatggagtaaatgacatttgatttaaaataggggtcaggaaactttttctataaagagtcatattgcaaatatttgagattctgcacactctatagtctctgttgcaagtattcaagtctgtcattgtcatatggggcctagtgtgcccaccctattgaaatcaccccgaaaagcagccatagacaatacagaaagaaatgtacaagtatgtctatgttccaataaaactttattttcaaaaacaggcaatgggctagatatagcccacaagctatagtttgctgatccctgatttgcacacccaaagtagagataggttttgttacgaccttatcagagggagaaggactgtagggaaagttagatattttatggttggctggtataggttgtggccaaaccatatggggtctgagagccaggttgtgggatgccaaaagtctatgaactttctgtagcagacacaggatccattaatttctatggaaacattttcaagtatcggggacccataatgttcccagaatgattagcatctctgagaaattatgggaaggaatcctagaaacctagaaagactgattttgacttacctactttattttcttgcttttcttcattagcatcttataattcactcagcttgtctatctagaggtcaaaacttatccagtcagaagaaacggggttggggcaacagtgggaggggaaggagctgtttgctggctgcctctcatcggactgtgaatctcagtgcctgtgatggagtaaagtgagagcagctggccacccaggtgtgtgaagtcagccagctccctgggctgaagaacaggcctccttctgcgtaaggctctaaatgtctctctccaactggactgtctgcacatgcagccaatatacggccttcagttccttctctccccagaaacctcatcctggtctaagacactggctcttagaccaagatgaagtttcatctcccaacaagtagcatttgcatcacttgggaacttgttagaaatgccaaaatctcaagccccaacccagacctactgatcagaaactcaggagtgtaagaaccagcaacctatattttaacaagacctccagaggatggtgatacacactgtattttgagaaccactggctaggatctctgtgctgccattagagctctatcccaaggggctaggcactgaactaatgaacattgcatgcaatgtaattctaacgatccccaaatctagttattattgccctttaacaaatacaggcaccgaggctctgacatgttaagaaatttgatctgaacctgggtcatttttattccaaaccccacattattgaccattctgctctagcaccctctctctatgcatagggctaggaggtctgtctttacaagtgtacttttccaaagactgtcatgatttattttcttaataacattcactgaccacctctcccatgccaggccctatcccaaagtatagcgtttattgttaagctccattctagtccaaaccctgcgagtaggtaatttgctttagcccctacagagcagaaaacacgcttaggaaggcagcattacgtgtttcagggccactgtagctctgagcattataaagtttcaaatgtgggt[134 bp omitted]acaccatctccagggttcaagtgattctcctgtctcagccccctgagtagttgggattacaggcacctgccatcacgcctggctaatttttgtattttagtagagacagggtttcaccatgtt[137 bp omitted]gaccatgtgcttgtgagagaggagaagtcagcaccctgagcagagcttcataggctcggtgagcctaaatgtggaaggtctgggcatccagctgattgaaactcaggtggcctgtgtgtcacaagctctgatgcagactcccaagacctcccatggctctgacgcagatcatagaaaaagccctttcccaatgtcccaggtttgagatcagtttcttccacaaaattagctgtgtggccatggataagtcactggccctttccgagacacagtttccccattggtactagactcaatcagtgggtttcaaacactttttaagttgcagaaagctttatctaaataatatctgacaccagattccaacacattaaatagataataaaggtagttgctctagttaattggaggaagggaagggaggaagtgaggagctgaaaaccattagcctttcctgactccctgcagtacatatggcaccacatgaagaagaagctacaacagcccacccaatctagcccccatcaccatgtgatatcccctgttactctctgccttcctcctctccagccttctttctattcctcagccgtcccagtcacacagcctccttagagcctttgcaccggctgttatcttggttcaga[137 bp omitted]ctctgcctcccaggttcaagtgattgtcttgcctcagcctcccaagtagctgggattacaggtgtgtgcaaccacacctggctattattttttatttttattttttttttgagacagagtctcactttgttgcccaggctggagtgcagtggcatgatctcggctcactgcaagctccgcctcccgggttcatgtcattctcctgcctcagccttgcgagtagctgggactacaggtgcctgccaccatgcctggctaattttttcgtatttttaatagacacggggtttcaccatgttggccaggctggtctcaaacacctgacctcaggtgatccacccgccttggcctcccaaagtgctgggattacagctgtgagccaccacgcctggccctctttcaagtcttttgctcacatactgctggctccatgaggcctagtgtgcccaccccattaaaatcacagccctcttcactcactagcacttccaatcccctctcccttcactctactgtttttcctttctccaagctcatatcactttctaccttcatatctaccttttattgtatatatagtttatggccagcctctctctgctggtaggcaacatcctgaaaaaagtatatcccaggtgcttaaagaagtgcctcagaatgtaataggccttccatacataattgttgttatgaagaatggagctttgagggctctcattgttcataatttgtcttcccatgtggtcgcccaacctaatatgtgcttccactgtcctgaaactcattcattttgtctggtgcagagctagagccctaagggcaccaaaacccagctggtctttctgactccatgaggctcagagcaaagccacttgcttgcttcacaccttcaacaaccttgtattatagtcagagagtgagacaggaagagtgggaagggcacagaagcagggctggaaaagcaagaaggaaggaggagggaggagagggcaggcagtactattgtgggtggcttagcgcaacacaagatcagcacctgccatgggccagttctgcagctggccatttctcacgggctgtctcatctagcctcctgaaaacaccatatattgcaggtgataactaaggaggtgaaccccagagaagtgatgtaatttgcccaagatggtcctgtgagtaagggagtacctgggattcggatccaggccatctggctccagagcctcctctttcctctctaccggtattacccacagagccacagtggagacgtgatgagtctttctcagggagatgggaaagaggccaggaatccactgtgtgtagctgtgctttctctgcctcattcctctcctgcagccacatgctctggtctgcagttcagggacctctggccctgggctcctctcctgtgatcgagccccgggaggcagctgcgctcatggtccttgtgatcacagttcctgcaataacctaggagaatgtttgcccacgtcataccctctccctttggtgtccgcggaggctgtgaagccagcaacacgacgttttgtctggctaagctttggggctgattgaaagtcttcagaacctgcactcctccggtgctgctcttcctggaaacggttaccatggaacacagccacgatgcagccttcactgtcagaattaatgaaagtcagaaagctattaggggaaggatttttttcctccctccctcttgcacataattctactcttcagtgaggtgtttgcatgtctgccctgcttgtgagatgttaattgcgtcctcattgaaattccttgcccactgccatcacctccttttgagctccagcccctgaagctggcctttttgagataatgaagctaagtgcccagagagagtgcgtcccagcctctctgaagaagcatgcatcttatcaggccacatcacagccgaaaagcattgtgtggctcccagcgaccccagaacatggcactcaaagactctcaaaaccaggttgcagttgcactttgcaggcttcctccttcctccaggacatcctgggttaaagttatagagggccagctctactctctgatgacatcttcacatctctgtgcctcttaggcccctacagcttctgtccagaatgccctcctcctggcctctccgtttcaccagctctcagtgttcagctacactggccatcttctcagtaaaaccctccatccctagagaagcataggtccaggtatacctatggctcctccctgttccccaggtcacatgtctcatcacaactatttgctgcaaacctgcctttctctctaaacagtgagtttcttcagagcagaggtaggctctgattcatccttcaattcccagagcctagcactgtacctggcacttcacagatgccccataatgccactgcttccttgctcctactccacctgttaatagaaggaaagtaaacacagctgagcccatgagggggcgaaagaacatagcgaatataacgatggattgctgtgtagactctacccactctctactgcccaacccaccgcagaggcactgaaaaagaaaagccaggtctggggccctaggagctcattctggctggtatttatagcaaggtaattagctcccttccctagcacccccggaagtgctgggagacaatctagaagcagcaatgaggaaagcaacataaagggattgccatagaaacatggggatggggctgggggcacttgggggaaacagaagcagcccccagcactttctgtgtttctcacccgtaagtgcaggagctcagtcctgaaaggaagatttcccaggggcggtctctgggctcttctttctgtggccaaaggcacccctcctccactcagcccaggcttgaaaggcactatctggtcccaccacagcagaccctgggtctgcaagagattctacatcatggagcagaaaaagtcccccaagttctcctaccttggactcctggagaagcttatcctcacccagataactgaaacttccctgccagagctggagaaggctggaggcaattttccttcctagtagtgacgcaagggagttatgacagtggattggatcctttccatcttggtgcccctcacctggactcttgcaatcatggtctaactgctcattctgtctctgttctcacctctgttcagttgaatctccacatttccaccagagtgatacttctaaaatgcaattctgatcatgttattttcctgctcaaaattcttcagcagctccccacagttttcaggatagaaattcttataattttgcatggaatgcaggctccatcacgctttgcctctctggccactgcccactccctccccccagtatgaagcccatgcaattttcatctcagtcatactaatcaatgtgtggttttccaaactcatctctctcttgccttggggactttgtccatgctgttctcactccctccccttcagactcctcctcaccttttaagtctctgctctaggactatatcctttcagggaaggcttctcaacctcccaggtagaccaggtacctcacttgttgctccattggaacttctgtgttcccacctagtgaatctcaaggcaagtcagaatcactggatttcctgatggcctctccaactgtatgtcaagtccttgtaggcagggccatattttcttgatttctgtaccctaatacctaacacaggactgacacccaaataggtgatttaaatgtcatagggttggcactagaatgaggtgagtgagccacccagggtgcagaatttaaggaaatgctctcaaatttgtgcaagacaggctggcatgaattgtcataaggggattttcacccttgctgttttgcttgtcaggtcacagcaagtcctgggtaggtgaaagggcatcaacgatttgggagatggatagaggaggctgcacttttctggaagaccttgaccttctagctccatgcaacactaaaaagcatcttccactttaccggaatttctatggaaatctccaacttcttgcatgtagggtaagatagggaagatgatccccacttaaatgcagtatcatgaactcctgagctgatggcttctacacttagctaaagtggactctatgaatactgtctgtgtctaccatggattgctatattcaagagctatccacctagctttctgtaatatgcaaagatagtttctaaaagggaccattaatagcctcttgaaaggaaaagaaaataccaccaaaactatgatgcactgccagggacatcacataaaaccactcagattcctcataacacaactccagggagcaccttcatataggttgcaatgtcaattgtgcccctggatttgtgcaatgtggtggccatttccccatgatctctcagctatacatgaactcagcccagcttccctggcactaaattcaaaacactcaaaaacatccttaccaccatccacagtgaatgagaaaggggaacaaacttagagctggtgagctggatccagactccacaaatggtcagcttctctcactttccaactggatgaccttaaaccaaatctctttaatctgctctgtgaatgtgaggccccatgttgggctcacaaaagaacattagcctgagaggtacctgcagagggaaggatgggcagcccctctaaagtaggctaggtgaagggagagtcttgcctcatgggaggcagaaggagattatgagggttaacaaatgtgtcagagaacccgggcaccttaggttcatttactttgatcccttcagttttcagacataggaactgaacggagcaatcaagacagtcctgcccaatatcattgaatgaattagcagcaaggaaaggtccaatattgccaggccagggcttattcagacacatagttgctttattttagtgatggagtgggtctggctgacagcttttgtagatctttattcagagtcagctggaaaaattagtccctgctcattgaagatcctcccattcccagagtgaagactcccttcttctaaaaatgggccaagagacaaggaataaagtacctagtaaggctttgccaagcagcctctattggcatctatctgaatcgctggcttatagcccatgaagagatgcatactttctggagtcaagcttccctaagtgagctccaggggccaattgcactgaaaccccctggggcttattaaaatctggctttcatagatgcaccccagatctactaaattagagcctaggggtgggaggataccattaacaaactccacatgggattttggcacacaataaagtttgagaaccaacacccagacattatagtggtaagaaggaacctaatgggtatcagatatctactttgctaggcactagatagatagatatccttagaagtgatagaaaaggcagaaacaagacattatttctttgccacacttagggaagctttgcaccagagggtacgcatctcctccttggttctacaccagcaattcaggtagatgccaccagatggtgctggaaagagctttccccagcacaggaaattaagacaatattattgggcccttgggtcattggatagcgctgagaacagcatctagaacccaccacctcaaaatccttctcaaagggagggaatgcatccttgaactttcactcaagttcgtactctcagcccttaaggctctgcacagaatttcacaaattataatttgctctatcttttcccacctaaattttaccctctcttctcaaaacttcttctgtcttaacactcctgctacattcttggctctcccacttactggttatatgaactctgacaatttgttttatctctataagcctcagtatttttatatataaattggagataatagtttcagagtagtagtaagtattagagataattgtagctcaataaatgtttagtctcttctgtacttaaccccattttcagaacgacaagcccctgtttaagaaaccccagtggctttctggtctcatttgcttctccatgacccaaactctccgatttaagttctcatcacacctcattcatgtctgctcctggtcctttgctcatgctgtatcttctacctaggatgccctcatactttcatccacgaatacaaatcccagcatgcttaaaggtctttctcaagttcttcctgctgcttcaggaagccttctcaaagtccaggccaacagactcttctgtcccctctgctccttcaggcactctctctgaatgctccactctacctcctggagatgagaacactagagtcatggaagtcagtgatctctaggtattggaattttatgtacagaattttttatttttttgaggaccagcaccaggccaccaccttttattttgccaggtgagaatatactattaaatcttgtattctagtattaccatcgtatcacaaaactgtgacattttagtaaaataaaagttacaaagggaaaaaaatctcatacaaaagcattgtcctttaaacggaataaactccacttcctaaaatgctcactgcattgcctgttttttgctccttttgccttggactgataaaaatactaccaaaggccagcttctgcaaaaatgcgggggagtccccagtccactcaatcacctgtccccgccccctggcaacataatgacaacctccacaacagtttccacttactgaacacttgctatgtgctagaccctgtgctaggtacttcatgcattaccttactaaatccttttgcacaacctctgaaaaatagatcattactgctaccacttttaagttgaggcttagaaaatttaagtaaccagtccaggtcaccgtgatggtaaagtagttgagttatgcttacagtaaaagacagtttgaccccaaaatctgtgctccttcttctgcttcatttcttgtctcctacaatgggaagaagtttttgaatgcaggagcataaggagatatgcttctctttctttgtatagtccatactcacagcatgcatttatttgttcttgtttttttttcctttgcatgctattttttttttatcattatactttaagttttagggtacatgtgcacaatgtgcaggttagttacatatgtatacatgtgccatgctgctgcactgcacccactaactcgtcatctagcattaggtatatctcccagtgctatccctcccccctccccccaccccacaacagtccccagagtgtgatgttgcccttcctgtgtccatatgttctcactgttcaattcccacctatgagtgagaatatgcggtgtttggttttttgttcttgcgatagtttactaagaatgatgatttccaatttcatccatgtccctacaaaggacatgaactcatcattttttatggctgcatagtagtccatggtgtatatgtgccacattttcttaatccagtctatcattgttggacatttgggttggttccaagtctttgctattgtgaatagtgccacaataaacatacgtgtgcatgtgtctttatagcagcatgatttatagtcctttgggtatatacccagtaatgggatggctgggtcaaatggtatttctagttctagatccctgaggaatcgccacactgacttccacaatggttaactagtttacagtcccaccaacagtgtaaaagtgttcctatttctccacatcctctccagcacctgttgtttcctgactttttaatgattgccattctaactggtgtaagatgatatcccattgtggttttgatttgcatttctctgatggccagtgatggtgagcattttttcatgtgtgttttggctgcataaatgtcttctttcgagaagtgtctgttcaggtccttcgcccactttttgacggggttgtttgtttttttcttgtaaatttgtttgagttcattgtggattctggatattagccctttgtcagatgagtaggttgtgaaaattttctcccattctgtaggttgcctgttcactccgatggtagtttcttttgatgtgcagaagctctttagtttaattagatcccatttgtcaattttggcttttgttgccattgcttttggtgttttagacatgaagtccttgcccatgcctatgtcctgaatagtaatgctgaggttttcttctagggtttttatggttttaggtctaacgtttaagtctttaatccatcttgaattgatttttgtataaggtgtaaggaaggaatccagtttcagctttctacatgtggctagccagttttccacatatggctagccagttttcccagcaccatttattaaatagggaatcctttccccattgcttgtttctgtcaggtttgtcaaagatgagatagttgtagatatgcagcgttatttctgagggctctgttctgttccattgatctatatctctgttttggtaccagtaccatgctgttttggttactgtagccttgtagtatagtttgaagtcaggtagcgtgatgcctccagctttcttttggcttaggattgacttggtggtgtgggctcttttttggttccatatgaactttaaagtagttttttccaattctgtgaagaaagtcattggttgcttgatgaggatggcattgaatctataaattaccttgggcagtatggccattttcacgatattgattcttcctacccatgagcatggaatgttcttccatttgtttgtatcctcttttatttcattgagcagtggtttgtagttctccttgaagaggtcctttacgtcccttgtaaggtggattcctaggtattttattctctttgaagcaattgtgaatgggagttcactcatgatttggctgtttgtctgttattggtgtataagaatgcttgtgatttttgcacattgattttgtatcctgagactttgctgaagttgcctatcagcttaaggagatttggggctgagacgatggggttttctagatatacaatcatgttgtctgcaaatagggacaatttgacttcctcttttcctaattgaataccctttatttccttctcctgcctaattgccgtggccagaacttccaacactatgttggataggagtggtgagagagggcatccccgtcttgtgccaattttcaaagggaatgcttccagtttttgcccatttagtatgatattggctgtgggtgtgtcatagatagctcttattattttgagatatgtcccatcaatacctaatttattgagagtttttagcatgaaggttgttgaattttgtcaaaggccttttctgcatctattgagataatcatgtggtttttgtctttggttctgtttatatgctggattacatttactgatttgtgtatattgaaccagacttgcatcccagggatgaagcccacttgatcatggtggataagctttctgatgtgctgctggattcggtttgccagtattttattgacgatttttgcatcgatgttcatcaaggatattggtctaaaattctcttttttggttgtgtctctgccaggctttggtatcaggatgatgctggcctcataaaatgagttggggagaattccctctttttctattgattggaatagtttcagaaggaatggtaccagttcctccttgtacctctggtagaatttggctgtgaatccatctggtcctggactctttttggttggtaagctattgattattgccacaatttcagctcctgttattggtctattcagagattcaacttcttcctggtttagtcttgggagagtgtacgtgtcgaggaatttatccatttcttctagattttctagtttatttgtgtagaggtgtttgtagtattctctgatggtagtttgtatttctgtgggatcggtggtgacatcccctttatcattttttattgtgtctatttgattcttctctcgttttttctttattagtcttgctagtggtctatcaattttgttgatcctttcaaaaaaccagctcctggattcattaattttttgaagggttttttgtgtctctgtttccttcagttctgctctgattttagttatttcttgccttctgctagcttttgaatgtgtttgctcttgcttttctagttcttttaattgtgatgttagggtgtcaattttggatctttcctgctttctcttgtgggcatttagtgctataaatttccctctacacactgctttgaatgtgtcccagagattctggtatgttgtgtctttgttctcgttggtttcaaagaacatctttatttctgccttcatttcattatgtaccaagtagtcattcaggagcaggttgttcagtttccatgtagttgagcggttttgagtgagtttcttaatcctgagttctaatttgattgcactgtggtctgagagatagtttgttataatttctgttcttttacattttctgaggagagctttacttccaactatgtggtcaattttggaataggtgtggtgtggtgctgaaaaaaatgtatattctgttgatttggggtggagagttctgtagatgtctattaggtccgcttggtgcagagctgagttcaattcctgggtatccttgttaactttgtgtctcactgatctgtctaatgttgacagtggggtgttaaagtctcccattattaatgtgtgggactctaagtctctttgtaggtcactcaggacttgctttatgaatctgggtgctcctgtattgggtgcgtatatatttaggatagttagctcttcttgttgaattgatccctttcccattatgtaatggccttctttgtctcttttgatctttgttggtttaaagtctgttttatcagagactaggactgcaacacctgcctttttttgttttccatttgcttggtagatcttcctccatccttttattttgagcctatgtgtgtctctgcatgggagatgggtttcctgaatacagcacactgatgggtcttgactctttatccaatttgccagtctgtgtcttttaattggagcatttagtccatttacatttaaagttaatatcgttctgtgtgaatttgatcctgtcattatgatgttagctggttattttgcttgttagttgatgcagtttcttcctcgtctcgatggtctttacattttggcacgattttgcagtggctggtaccggttgttcctttccatgtttagtgcttccttcaggagttcttttagggcagtcctggtggtgacaaaatctctcagcatttgcttgtctgtaaagtattttatttctccttcacttatgaagcttagtttggctggacatgaaattctgggttgaaaattcttttctttaagaatgttgaatattggcccccactctcttctggcttgtagagtttctgccgagagatcagctgttagtctgatgggcttccctttgtgggtaacccgacctttctctctggctgcccttaacattttttccttcattccaactttggttcatctgacaattatgtgtcttggagttgctcttctcgaggagtatctttgtggcgttctctctatttcctgaatctgaatgttggcctgccttgctagattggggaagttctcctggataatatcctgcagagtgttttccaacttggttccattctccccgtcactttcaggtacaccaatcagacgtagatttggtcttttcacatagtcccatatttcttggaggctttgttcatttctttttattcttgtttctctaaacttcccttctcacttcatttcattcatttcatcttccatcactgataccctttcttccagttgatcgcattggctactgaggcttctgcattcttcacatagttctcgagccttggctttcagctccatcagctcctttaatcacttctctgtattggttattctagttatacattcttctaaatttttttcaaagtttttaacttctttgcctttggtttgaatttcctcctgtagcttggagtagtttgatcatctgaagccttcttctctcaactcgtcaaagtcattctccatccagctttgttccattgctggtgaggaactgcgttcctttggaggaggagaggcgctctgatttttagagtttccagtttttctgctctgtatttttccccatctttgtggttttatctacttttggtctttgatgatggtgatgtacagatgggtttttggtgtggatgtcctttctgtttgttagttttccttctaacagacaggaccctcagctgcaggtctgttggagtttgctagaggtccactccagaccctgtttgcctgggtatcagcagcggtgtttgcagaacagcggtttttcgtgaacggcgaatgctgctgtctgattgttcctctggaagttttgtctcagaggagtacccggccgtgtgaagtgtcagtctgcccctactggggagtgcctcccagttaggctgctcaggggtcagggacccacttgaggaggcagtctgcccgttctcagatctccagctgtgtgctaggagaaccactgctctcttcaaagctgtcagacagggacatttaagtctgcagaggttactgctgtctttttgtttgtctgtgccctgtccccagaagtggagcctacagaggcaggcaggcctccttgagctgtggtgggctccacccagttcaagcttcccggctgctttgtttacctaagcaagcctgggcaatggcgggcgcccctccccagcctcgctgcagccttgcagtttgatctcagactgctgtgctagcaatcagcgagactccgtgggcgtaggaccctccgagccacgtgcgggatataatctcctggtgtgctgttttttaagcccgtcggaaaagcgcggtatttgggtgggagtgacacgattttccaggtgccgtctgtcacccctttctttgactaggaaagggaacctcctgaccccttgcgcttcccaaatgaggcaatgcctagccctgcttcggctcgcacacagtgcgctgcacccactgacctgcgcccactgtctggcactccctagtgagatgaacccggtacctcagatggaaatgcagaaatcacctgtcttctgcgtcgttcatgctgggagctgtagactggagctgttcctattccgccatcctcctcctccatttatttgttaattcaaccaatatttatgaagcatcaatgctcaggcagaggctgtcctaggtgctgaaatacagtgttaacaagggtagatagaagttttgccttcatagagggtacactatgacacatatgcacatgccaaatggtgatcaaaaatgcaatgccttgttagtaactccttgctctattccaagggcttttaaaataccaaggtgatagccaggtgggtacagatgttaaaacatgccctgggcctctctgggctcagtaattacctggttctcatatactgcctgcctctgctatggaaattgatgagccaaaggctcttttcagactggcaatcctgtgaactccaactccacttgctttgttagaaaaaggaactgaatttaaaagggacaaatgcaggattgattctgtaccttaaaatatacttccctcacctctctgcttggccccaggtccccaggtcacctagcccccaagcccccatttgctgcagagaagatcactctcttcaaagactcatttcatcccctcagactcactctgatcttacacctcttgaaatctgctctcccctttctcagattccttgtgacctccacctgcctttttctaacagctccagggcgatggtccagatcactctctgtgccactgtttcagacagcccagcagtcgtggcagcagtgttaatttattcatcccttaataccaaacagctcctcagtcagctcattcccagctgtcttggttcctgcaggacaatgttctgaacttactaacctcacaccttgggcctctgaccggagcctcatcacatcactggcatacagatcacaccacagtctgatggaagcttcacagcactaggcctgacagatgagtcacagctggaagggtcttcacagagtccaccagtgctattcaatgagagctctactgacattttaggtggagggctagggggatgtggtttctctttgtgtggagctcccttgtatggcaaggagacttaagcatccttgtccttcttccctgaaaataaatcccagggacagccaaacatgtgcccacacattcccaaatgcctgtaggagagaacaagttgagaagcacagtgcctattgtatttataaatgaaggaacttttccaaggttactgagtaagtcagctgcagacctggtgttctgatgggtgataggctacagggtttaatgggaagtgcactggagtaagaatcagaccttctgacaaccatgccggttgtggtacagggggctggggttgggggtggggcagtttgaggaactcaaaagtgtagagttggaaccaattattcagccttccctccatctggaaaagctaccttcacaggtctgtctagcacataccttggaggaattagcatttggtttcttcataaggtaactcaacccaagaaggaaaaagagtacttaaggtggactaagacaccatccatctgctaaactctggcaacttcctatagaccctcagtaatgggccactccccacatccacactccccattctgggctgggaccccaaaagtactcagccagagagactatgggctctccaaataggaggggtcttggctacccagtccccacctcttccgcttttattccttatccatgcccacttctgcctgtgggatttggaaggctccaggagaaaacttcaggctcacctgggaggagctagcagtctttccatctcccttggcatttgggtgacatgtaaatactggactagggccagaagcttgagttgctccatcagcctacctggtaccttccaacctgggcctcagttcttcccaccaagggtagacctgaagatgactgcagttccttcaatcctaaaatgttctattcaagaatattcttcaatgagataccaactccagtccctgaagatcaagacccccttggtaactaatcatccagcccttgtccacattgccaatctcaaaacagacctgagataaagtctcaacctctttgtgctccagtttgtcttttcacataatccaattgtctggaacttcttagaggccttatgaagatgtgataaccacatccaggagggagcagtttatgtaaaaacaagaggggatgagtgagtcaaatctaaatagcctcgggcatttctgccatgtccctggcaagtgatgattgaggcagggggcctgtaggaggcagttccccaggtttggggctggtgcccacaaacttgagtggcagtagttaggggttacccggcatctccccattatgcagccaggaactggggagtgggagaatccctggcagctctggcccatgacaacttttcccaaagtgctccgtgacaggtcattgcagggaagggagatgatggatggtgagatcccaccaccacttttctttctcaagtggaaagcacttgaaaagaagtgaatgagagaaagaacataacagaacaggtttaagaacattcaccgaaccagtccatggcactattgaatcaaagtgaaaatgagttgaagctgtcattgagagcttgtcagttgacttccaagaggcagttaatacagtgtaaagagtatgtacaggctttggaatcagattcatatacagattggaatcccagttctgtattttattagctacatgaccttgagcaaggtatttattttggcctcaatttcctcatctgtagagactacagtagtgcatgtcttatatggatgaaaagggaagacattaaggttttcctttccctacttccatgggggtaggagcttagaagcagctcagcgatatactgtggctgtggcaacagtggggaagaaaagagatgccaggaaagaactgtgggcagaaaattctaggggtggtagtggatcccggacaccaggtctacaccagtacacccccaaaatgaggtcatgtgcagtgagcagaagtgttaaaccttttggctccggggccagtgtcaggatcaagaggcaatacagtagaggtttcaggcaaagggctgggaggaacagcctcatcagtggacaactggaaggcaaagtggtattggccagatgtactggttaaaccagtgagaggacagactgctggggtagtgatgggctccagctcctttaaccacaaggccacttttctctgtagaaagaaagttggtagagttcagaatagcttctgagtcattagaagtgattaagtcccacccttgtccctcatgtccaatgtcattgtgttgtgccaagggagggctgagtgggagggagagggagctggtctggccctgtaggcaccctatgggagccaccttgttttgcatctttgatcaaggctttggaaagagactcacgtgtgatgcctgacttctagaggcagtaaagggaggctagaaagtagactcttcctttcccagtccacacaatttgcctcattttagtttttaaaataacttttattatgcaatatttgagaaatataaatcacaatacaactggcagccatccacctaccacccagattaggaaatatagctgaagccctccatggctctctacatgacaatactctccccatccttcagaaatcatcatgatctggaatttaggctttactgttcccataaatgactttatacttttattatgtatttatttatccctggacaacatatcgaattgttttgcatgttttcaaactttatatcaatggtatcataaaatatgcatatttgtctgaagcttgattttttcccctcaacattaggtttgtgtgatttatctgtgttgacatatgcagctctggtttattacttttccctgctgaaacgtttattatttcagaacaccacaatttacttattcattcttgttaataggtaatagaagctttattttcccaaagtttttctcttacaaaatgctgctgggaacattctcgagcctgagtccacacacatatgaggagataatgccttttgccccattcctaactccttcaccttttctagctcacacctttcccacatcctgcacccaagccactctgtttgggctccatgcttagactcctgtggtctaagcagtctcttgtttccctgaactggtttgggaattgccaacttgactttgcctttgggaactttcccagggattcatatttctgtcctccagcctcagacaaaaagcggtgggttagtgacccacgtcaagccccacaaagtcctatgtgacttgcctcggttgtgccaactccttcctggctcccacctgaccagactgtaaactccaaaaggcaagaatcgggactgacttatttcatgctgtagctccagttcaggcataggacctgatacactttgaatatttgttggctggatgactgcatgaattaatgctctatggagaagggatgtcagatgatcaggattacagatgcacttaacttgcaattatctctacctggatgtcttcagtcccccaccatgggtccttggccattctagttaatcttatctggactctgggccttttgtgtgaactaagaccacccgtcacttggtgaggtcttctcagataggcaaagacatccagtctctcccacataggatgaaccctagggcccctagtcatttgggggcacaggaggggaactactttccattagttggcctgaggtactcctaatggcgaacccctggagcccttaccctgtagaaggcagcagtcccctttgtctgctcaggttgctttttaatgcagcgcacatgctacaacggaggcacctgatggtagagccatacctgaaagtggatattgacaggaggaagaagaacgaactataaagggctcttgaacaaacaagtaataaagaaacattctggtgattgcggagaggtgggtgggactgagatgcagacaagggaaaccagggtcactctgggcaaatagcaagtcacagtaggacaaaaaccacagagatggataaagaggagttgcaatcaatccttccactggcccttactaatctgagaccttggctaggtcatttagccttacgtgataacagaaaactactatgtgtccactacagcccatgactacatgcctcatatggcaatttctaactgaatcagaacatcaactcagggtgctcaaactcagacctcacagccagacaggctgcatctcaagcaggcacatctaactgctgcaggacgctgactcctcaatggattgtgatccagtgtggttcttacaacatccatgatggacagatgaggatgatacatgggaaaccaaggcacacagttacacagttagtgaggatgctgcaattcaaacccagggtgttcagttgggttccacagcacaagtcactttggagatcatgaagcaattgctcaagaaaaggttatctagctcaaccttgcaaattatctccaaagtccatgagtccaagcccatctcacaggaatttctccactgaatcccctttatctaagagcacattcaaggaaattatggtgtcaatgaattcatgcattagtaaatttatttcataaatattaaacccctactgcatgcaaagcactgttcttggctccacaaatacagggaatgaaaaaccataaagtccctccttttgagattctcatgctggaatgtgcaaaggtccatagctcaatataatgccaagaaatttagcaagattgtgcattaggaacaacgaggaaattttctggaggaaagcatatctgattgttcagtgtcctaggtgcagcccatgggatatggccttgagcaactcataactcatgtcccacccctgggtcttcagtttctccatatataaaatggaaacattaaacaggatgatctcttgagttcttctagtcctattgttctctggctcccatttcagggcttttatatatcagtagcaatcaaaccctgggagaccatcagagggtaggggataaaatgtggccaggtgaacagagctctggagccccaggtgggcacagtggatcagcctggctcggactaagggagctcatgctgtcagtctcttcagaacaagactactcttggcctttttccaggcacctgaggtataaagctggcagtgccatcaaagacaggctggtggctacaatatgaaagggttgataaataaattctttttctccttaatagacaagctggtgggttttattgtaagtggtttgcactcagtggagagccaggactggcaatgctgcatctttcatctccaaatattaattaattttccatgatgctttattttaatcatgaaaaaatgagattggtaggaaccagccaagggaagagttggggagaagcaggcaaattttatatatatatatatatatataattttatatatatatatatatatataattttatatatatatagagagagagatatatataattttatatagagatatataattttatatatagagagatatatatataattttatatatatatatatagttttaaaagcagcacagataatgtaggggaaggcagttagagatggggagggttcatagacagaaagtgaagggttggaggagagaaaggaaactgatattttataaacacctactatgtggcactgtactaggttccttgcctatattatttcaatcaaccctgaaaccaatttgtattactatactcattttacagatgagcaaactaaagctcagaaaaagtagataactttcccaagatcaaaatcaaataaattgaaaatacagaattctaaccgtagctttctgacttcatgtctcaacctctttcaacaacatccattcaacctttgacaaatatttatccagtaatgattgtgcctcgggcatagtaccaggcactgtacaccctccagccctaacaaacacacagaagggtatttgaatcaatcttggtagatcttgaaggcctctcagaggaagtgatttctaagccgtaacttgaaggatatggaggagttagccctggaaaggaggagaagactggaggagaaaggacatcaggtatagcatgagttaaaggttataaggtgagagttcaggatccattaaagtaaccacaagaagctcatatggctgttaagtcttgagttagaagtcaggaggggtaaggcataaggtgggaggggccagatcatgcagataattatgacatcaaaggtgcctggattttaaccagagagcaatggcaaagccacagagatgatgccatgattttagtgttatggaaaaatcccattgatcatagtgcagagaatggatttaaaaggaggcaggattggccgggcatggtggctgtaatgccagcactttgggaggcccaggcaggcggatcacgaggtcaggagatcatgaccatcctggctaacacggtgaaaccccgtctctactaaaaaaatacaaagaagttagccgggcagggtggcaggcgcctgtagtcccagctacttgggaggctgaggcaggagaatggtgtgaacctgggaggcggagcttgcagtgagccgagatcatgccactgcactccagcctgggtgacagggtgagactccatctcaaaaaaaaaaaaaaaaaaaaaaaaaaaaagtagataggactatggcagctgcccaagtgagagatcatggtggcctccaacagggtagtggtcctcaaggtggaaagaaatgactacagaccttatgcaaactctctaaactcatttttacttagaagctcatacaagatgaggctagtttaaataagaataataatactctctaagcacacagaggaaggactttagagagaaggacagcatggaagaaaatgtgatcaatattttctgctcctttgttattacccaatccattagcacatattgaggcctcaggatatgccaagcagtcttttagacgctataaggatgcttttacctctttaccttcacaaagcttccaactagttagaaaaggagggcatacgttcttaaaaagacacctagcaatatacatcagagaggcacagacaagaagtaggatgcaggaagagtagtttgggttggcataaataggagtggagggggtgggagagaagaagatggattatttactagcacattctctacatgttgtgggttgaatagagtcccccaaaacagacaggttgaaatcacaaacctcagaatgatcctatttggaaataaggtcattgcagatcagtcattgcagtcaagctaaagtgaggtcacactggagtaggatgggctccatttcaatagggctgatgttcttgtgagagagaaaaaatggtcatgtgaagacaaggcagagattggagttatttttaaatttgtacttctaattgttatatcactagtttttttgtggttttttaaagatattttttatcatagttggttgaatccacagatatggaatccatgatgtggaactcatggatacagaggcccaactatgctttattatggcagccctaagaaattaatactgtgtatctcactttaccctcccccaaactgcatgaggtgggcattttcagttccattttacaggtcaggaatctgaggccccagaattaacatggcagaccactccaccaatatgtggtggacctttgctcggctgcccactatgggagtagttctggaggtaaatttcaaaggatacataggaaatagaagttaccagatctgatcatgtggagagcaggagagctttactccattttgtcatgcattgcttttgtccccaagagaagcaagtgtttactgggtgtcaggggcgggtttggagctgaagaaaaatcatggttgaattagacatggttgcccctgaggaattcacagtccagcgagggagaaagatatgtgaccagacacaatgaggtgagcagcctgtcactgtgcagacaaagcgcatggaagcacagcccctaggtactcacttattttcctaaccaagagacatcttgacaataaggcacctactgacttaacagcttgcagaaaaaggaaacttgatgacatcaagtgaacacaccacagttcagacatcaaaattttaaattcccaattgaaaaacaacagcaacagtaaaatatgggaaagtgcacatcttagaatcagggaaatactatagctttgcccagaacagggatggaaggttttctaaagattacagcacttgagttgaatctgaaaaatgagggcgaatgtgctcagggaagggccctgggagacaagttactcacaggctggtgatgctttttcccagaaaaatcccctaacaaaatgtcagctccacaaaagcaaaggctcagactgctttgatcactgctctatctgcaacacctcaaagaaaacataggaggctttccgtaactgtgtgtagatagaaagaattagcatcattagggtgagactgtatatgaaccacactaaaggcgactggaagtttggcttgcatcatctgaacactcatttttttctcttatgaaacctctaccctatacccatccagaagtgatttctgggaatgcacggttgggtaagacaaactctaagggttctcagttgacagaggagatgactaataagtgatttccataccgtgtgatgccccgtgatactgtgtgatacatgctctgatggcaggaacaaggtgaggaaaagcaggcaagtttggtgggggaggtgacattcaacagggatttagaggactctggaggatgagcaatagattagcctgctagaggaaagagggcgatgctctagaaagagcagcagctacattaagagagaaaagagagagagagagagagagagagagagagagagagagagagacagagagagagagagagagaaagaaagaaagaaagaaagaaagaaagaaagaaagaaagaaagaaaggaaagaaaagaaagaaaaaagaaagagagaaaggaaggaaggagggaaaagaaagaaagaggaaagaaaagaaaggaaggaagaaagaaagagaaagaaagaaaggaaagaaagaagggagggaagagagggagggaggaaagaaggaaggaaggaaagaaagaaaaaagagaaagaggaaaaaagagaggaaggaaggaaagaaagaatgaaagaaagaagaaaagaaagagaaagaaagaaaagaaagaaagagagagaaaggaaggaaggagggaaaagaaggaaagaggaaagaagagaaagaaaaagaaagaaagaaaggaaagaaagaagggaaggaaggaagagagggagggaggaaagaaggaaggaaagaaagagaaaaaagagagaaagaggaaagaaagaaaaagaaaaagaaagaaagaaaagagaggaaggaaggaaggaaagaaagaaagaaagaaaagaaagagaagaaagaaaggaaaaaagaaagaaagaaagaaggaaagaaggaaagaaagaaagaaagaaagaaagaaagaaagaaagaaagaaagaaagaaagaaagaaagaaagaaagaaaagagaatctcatagtattccgaaggctgcaaatagttcattgtgacttggaatgaacactggaaggtagaatacatggtatgtgtgactggcaggtcatacaggggccaaatcacagggacatgcctagtgagaggtctggattttattgggaaagcaaagggaattcccatgatatttgctaatggatccaagttcccagacactttctacctgctttgcaaggtgatctcctctgaccaggccacattctctcaccccaggaaccgcaaacacattgtccctgcagaccaccaaagagcaggattgaaaacagtatcaggaaagggagaagccatgtgtaacattaccttaatttaacattcttcctctctttcttgttttttttttttttttaaatcaattggtgattcataggcactatatttccccctcaatccattcgcaagagaagtgttataataacatgtcagggaggtgtggataagcggcatcatggagcctggtttataatgcagtttgttaacagatgctaacgtcccgattatgcattccagcatcatttatacccagctccatggcacggtaaggctcgtcacatcataattctccaaagcagttgctattaatcactcattcattattaaaacacattgtattcattccgcttggcaactggagcagggcaggctctatttatccagagcaattatcttcagactttgtcaacctcagcccagaagagcgtccggccctccaggatggctgagagctttgaagagacacctcaatgcagaagggaacacaggactcacagaagacatggatctcatccaaagggccatccatccctgagagggctgagggctcccaggaaccaagaccatctgtcccctggttgtctcctcctactgcgtctcccttcaacttgaaatctcttccctttaagtgaattctgctgggctttcttctgttcccaggtatctcaatatcacctggggaaccagagctactccccacttcctgggctcatatccaaacttacttgatcataggaagccatggagttttgtagtgaaatataagggctatggggacaaatcccttgccttctagcactcattgtgtgatgttgaataaataatttaacttctttgtccctcagttttatcagctgtaaaagggggttgataataatagaacctacttcatagagtttctgttaggataaaatgagttaattctgacaaaagtccttataaaatgcctgaaatataattcacatcagctcttgttactacttattaaaaccatcctagcatttcctaaatgttcccccgcccagctgtttataagcatgggcatggagatctattcctcgactctgtaaatggctgttgagcatcccaaatgtatccggtattgttttaagtaccagagacacatacatatacaaggctcagtccctccttcaaggggcccacccactagtaatgtagtgttgccaaaacagtactcagacctttagagatctggaagcccctctgtttttccccaaaagtctgtatttggttacgctttccagttcacacagtactttttctgcttaccacttcgtcaagtgcttacctgaaggtaacaaacacacggctcaactctcaacgtcaagtgagtacccagggtcactgagggttcccacgcttttaatgaaatatgccagcctaagaatgtacagaggataatttaatgatttaataatatattttatttaaaagattttaaaggcctgtgaatctctccttttgcaccatccagtaggaaccaccaatctcaaatccggtgtttatgatttccatgattatttttgttaacatttattatacaagtgtatgcctataaacaatatgtaagtctccgtacgtgttttcaaactttatatagatgataccacattgtatatatcctgtcgcttgctttttctaaggaatgcattttattacggaaaaattcaaacgtctgcaagtaaacagaatagtctaatcaactcctatgtatcacctggctccaacaattgtcgacattcagccattcttgatttacctatgccatcaccataccctacctcccatcaatcaataattatagcttacagttctacttttacattttataaacacctaaatgcataaacaataactgtatgcttaaaaaaaaagtagatacagccaggtgtggtggttcatgcctgtaatcccaacaatatgggaggctgaggcaggtggatcactgaggtcaggagttcgagactagcctggccaactttgagactagcctggccaacatggtgaaaccctgtctctactaaatatacaaaaattaaccgggtgtggtggtgggtgcctgcaaccccagctactcgggaggctgaggcactagaatcgcctgatcccaggaggcagaggttgcagtgagctgagatcgccccactgcactccagcctaggtgacagagtgagactccgtctaaaaaataaataaataaataaaaataaaataaaatataaagataaaaataaaaagtggatgcatcatgtatctctagccatatcaagatacagaacactcatatctacagaaaatttcctcctttgctgaaactcctcttcccctcctgccacctcacaccccagaaaaccatcattttggccttctcacctcagattacattttcccattctataacctcatataaatagaatcatatggcatatagccttttgtgttccttttgggagagggggttcagcactgtctctgagatttacccatgttattccatgtatcaatagatgcttactttctactgctaagtagtatcacactgcaggaatatagcacaattttgtattcattttcccattcatgagtattggggctgtttccagttcttggtaattgtgaataaagttgctataaacattttcatacggtactttttgtaggtatttgtttgcatttctcttggattaaggagtgttcctcttaacggtttaagaaattaccaaagtggttgtgctattttacattttctccagtaatggacaggcatttcatttgctctacatactccccaaccattgttgtgagctgatatttcattgttcaagacttttgcttacttttattaaattgtcattttattgttgagttgaaagagttctttacacattctgaatagcagtcttctgtcagaaatatgctttgaaaatattttcttaagtctatttattttctataacaatgatatattttgttgatcagagtttttgtttcttttgattttttgcaggggagtgggaggggggacagtctcatttagtcacccaggttgaaatgccgtggcactatcatgcctcaacgtagcctcaatctcccaggcttgagccacgctcccacctcagcctcccaagtagctgggaccacaggcatgtgccacaatgcctggccaattttttatttatttttatatttgcagagatggggtctcattatgttgcccaggctggtctcaaattcctgtgctcaaacaatcctcttgcttcagcctcccaaagtgctggaattacaggcatgagccaccatgcctggcttgtttcaatttttatgaagtctaatttatcatttattttttattttatttcagagttttcagagttttgtcttaacatttttcgttatcctgtaaacatatttccctgtttttttcaataagccttataattttagcttctatatttagaacagtcatctctaattaaatgtggtgtgtgtggtgtgaggtcagagattgggctcactttttttttgcacagatatcctgttgtttcagcacaatttgttgaaaatactttcctttttcctttgagtgacttgctgtttttgtcaaaaattaattcaccataaacatgtgtatctatttatgtattctctggtctgctgcagtgattgatgtgtctatctttatgccaatatctaactgtcttaattactgtagctttatattcatatgtcttgaagtcaagtagtttgagttcttcagctttctttttcaagattgtttaggctattctaggtcatatgcatttccatataaattctagaattgttttatctatttctatttttaaaaagccttatggagttttgatttgaatcatgtcgagctatggatcgctgtgggaaggtttgacatcctaacaatattgaattttccaacccacaaatatagtatatctcttcatttatttatgtcctctttaacttttctcagcaatattttgtagttttcaatatagaggatttacatatcttttgttaaatttatcaagcattttacatttttataaaattgtgaataaaattttaattttattttctattgctttctgccaatatatagaaatacaactgattttccgtatgtatcttatagtctgagatattgttaagtttatgtaaatcgttctaggagttttctttgttcattcctcaggcttttcttataaaattgaatactatctgtgagtttgaattaattaaataaaacttttgtttatagaaacaaattcttccttttgagtctttatgcttttagttttcctcgcattattgaacaagctagagccttcatacaatattgaatagaagattcagcattctggccttttttttctgatcttaggggaaaagcattcagggcttccccatcaagaattaacaatagactcttgcacatgctctctatcagaattgggattctagtttgttagaggatggctattccaatttgctgagaattactgtcattaatgagtgctggatattgttaaatgccttttctccatctattaagatgatcatatatgtttttaactttaatatattaattaaccagattacattgattaatttttaaatgttgaaccaaacttgtattcctgagataaaatttaattggttataatattctttttatatatttctgaaaaatattttgctacagattcttgcatctatgttaatgaagaatattttcttcccttttaatgtctttgtcatggtttgatatcaaaaatcaattcataaaatgggttaagatgttaaaacatgtattttcctcctctattttctggaagaggttgtaaaagatggtactacttcctccctgaatgtttgctagaattcacctgtgaaggcactggaaccaagagtttatttgttgaaatgttttgatttaaaaattcaatttttttcatgggtatagttattcagaatttctatatcatcttgtgttagttttagtttcatgggcagttggtcagttgactcaaggcgtttgctcatttcatctgaattgtagcattttcttgcatgattttttaaatagtattttctttttatccttttaacatctgtaggatttataatgatattcatttcttaattcatgttattatactatagataacttgtgtttttcctgtttttgttttttggtctagctagaagtttatcaaatgtattaatctttccaaaagcaatttctggatttcttggttttctatttttaatttttaaaaatttctgctgttatctttattatttcctttcatctacctttttttttttttttgcttgtttttatttttggtctttattggcagaaacttagatcattaatttatacctttcttcctaatataaacattcaaacttaacatttgtttcctctaagcactgaattagcttcatcccttgcttgtttggatactagttaataattacaaaaaataatgacagttattaaaaaaataaaaaggacactaaaatattctttgtacagattcacctctgttaatatttcttgacatttcaagttctctcttgctcgttcttactatgtatatgtgtgggtgtattttctgaaacatctgaaggtgatttatatatattgtagacatttatcactaaataattcaatgtgtttcccaagagtaggagtactttcttacataaccactgcaattattaaattcatacatttacatttatgttatacttcaatctagtataccatccatattgtaattttgtcatttaacctaaaaatgcctcttataatgtctttttctcctgtagcacaggatcctatctagttgtcaagtttctttagccttaaatagtctcgaatgtttccacagtctttccttatcttttatgacaataacatttttgaaaaatacagccctactaccatttaatagaaagttattcattttgggttgtctaatgtttccttgtgattaggttcaggtcacacactatcttaggatatcacaattggagatacacaatgtccatcttccctcattggtgatgttaatttgatcatttgttcaaggtgttgccaattttttgaaaatatagttattgatatttctcttttaactgacagtcagtatatgaagtatctttctctcatcaaaatacccctccctagattcagtatccattgattatttttacccatttttactacgatgatcacaaaatgatgatttccaagctccagcactccttccatattgattagttggccctcagcattctaatgccaggaagaaacctcccctctcctgtatgtctgcatgtatgtatgtatgcacctatttatcaatcatatctatctatccatctatctaatctatatactcaataaatgtgtctacctacctaatgaatctaatatggatattgattcatgcatttctatttttccatgatttatcattcattactatccttaatcattttggcgttcaaatttttagaaatttggtcagtgagaactccttaaagctagttcctgtgtccctgtgacatcctcccaccatgttttaaagcactttcttattttcctacatagtgagatattccaggttcatcttttaccccagttccagccctggaatatgaaaagtcctagtttctttaattgagaaatggtagtagagacaaaattatgggtgctatttatacttattattccaggagtatatttgcttcttggctctttagcaaacagagctaagaaatacatgcatggacatatatatgtacatgcatatttacataaatatacatatgcgcaaacctagatatgcatacatgcaggtgcatacatatatgttcacttaaacatatatacacacatatatgtacatatttagagatatctccagttccaatccatcctcaggattattttgtgacttctcctgtcccatagtatgtttgtataccttctttcacaatgagaactttgaccctcggtatcatttacacatctactcttttggcttggcacagtggctcacagctgtaatcccagcactttgggaggccaaggcaggcagatcacttgagtcctggagtttcagaccagcctggaaaacatggcaaaaccccatctcaactaaaaataaaaaaataaaaaattagctaggggtggtggtgatcgcctatagtcccagctacttgggttgctgagggaagaagatcacctaagcctgggaggtggaggctgcaataagctgtgatcacgccactgtaccccagcatgagtgacagagtaagatcctgtctcaaacagaacaaagcaaaacaaaaccatttactcttttgttcagttctacagtatcttaaagtacattcagaattgcttcactcaaacactatgataggcaaacctactaaaaggagtttatcaattattttcaattctcccccaccacaagtccaatctgaccaaaactaaaggtagtcacaagttgtgttcataaggtactcaaaatagtttgttctttattcccttccagctagttatggtattaatttgaaatataattaggttcatttgtcagtttgctttcagttttagggttctctcctttacatttttcggctttaatttaatttgggggttatactgacattttattattagcatgcatccgaaagtcaaatatttgaaaatacgtaattagaaaagtgtcactctttctcatacttttccatcccacctcgcctcacactttgtaggtatccaatttcactattttccagtttatccttcttatgttctttatgtaatgataagcagatatgtggctatttccttacttaccctttttcttacacatgctcatttgtatctcgcttttttttacttataaacatctctttgaaatcattttgtatcagttcacaaggatcttccttacttattttcaacaactacataatactccattgagtgactgtgccatagtttattcaacaaaactgctctgctgaaactttctggaagttccaattttttgaaatctcaaatattgccacaataaatatcctgttcatgcatttttttatatagttgtaggtgctcctagatgtggctctcacaaattgtgatatgataaattgtctttatcatttagattgaaatattttataatttttccttgtgatttcttatttgaactatagtttataaatgtatagtttaatttcaaaatatttacttttattggtttcaaatgtaattatgccactgtcatataacttaccctattaccctataagatttcaaacttttgaagtttactatgacttgtttatgatatttacgttatatggtgtatcgtggtgaacactcctcgtacatttgaaaacattttgcagttattgggtttagtgttctataagtgccaattaggtccaagcagtttactgtgtcattcatatatttcatatcattgttgattctttgtgtaactgttttatcaatgactaagaagagtgttaaaatcaactctaatagcagatatgtctattttgattttagttctgttatttttttcttcgttatattttgaaactctgttaagtgcatatccatttataattgttatgtcttcctcacttattgacccttatatgttaaaatatgctatttttcttatccataatactctttatcttgaaatttattttgtctaatgttattttaccccctatatcttggttatggttagtggtgtttgcatggaatatcttatctttttactttcaacatattttgtctattttctttttttatttgttgatttattttattttattttatttttattttattttattattattatactttaagttttagggtattttgtctattttcaacctatgtgttaacctattaaagtggatttcttgtgagcaacatgtagttagttgcgtcttttcttatcttttctggcaacttctgtaacttattattttgttttctgtttaactctttgttttttgaggattatgcatgtagacgatacgtatagctctagttcatttattgtcattgctctgtaaaatactatggcaggaatataccaaaatctagttttccattctgcttctgggctgccacttgggttgtttatgatttttcatatgtacaaacaatgccaaaagtatacagtcctgtgcatgtcttctacgtacatgtatgttccaagacaaaggtaagtgtacaattcctagatcttagaatatgagaatcatctgtctttaccatataagcattcactgatatgggtaaaaaaaaaatgcagttttgccagtttatactttcatcaagcgtaaatgagaatttctcttgatcgatatcctttccaacacttggtaacgttacacacacccaaacacatgcccaccacatgtgctatctgacagcttttaaacggagtctcactgttatataaacctgcatcttttcatgtgtatattggccattaagccttcctcattgaggacttgctcattcatatactctactctcattttttaagctgaaaaataaaaatttggaggcatgattttcccaagatcacacagcagtcatggattagacatgagtccaggtattgtaacactgaaaataagtttttctctctctttatctatctatcgtgatactgtatagattttatgactaggtatatgcgtgtgtgtgtgtgtttgtgtgtgtgtgagagagaaagagagagagagagatgagatgagatgagatgagatagtatgggatagtatttctaaaattcgtattttggcttgaggttttcagatccagttctaataaatagaacatccaagacaaatcacctctgatgtaccccttccctccaatctttttcccaagtaaaataaaaataaagtgaaagaaaatcaagaacaaccttaaggagatgctctgagaagagagtccccagtcttgcctatcttatagggtgggcttatgggctgaacaaacaaacgtgggcatcaagtcagccccagcaaccacttttttctctctttctggaatactttctaaggtattgcccagattaggatagggagccagggcgctggcctaattcctaaccaggaacaactctgggaaggctgccttctgtgactgccctaggaaacctagctcttcctcgccctctctctgcccctggctctcccagcctctctgctgccgctgcctcaggattgatcattagcctgggattagcagctgtgccagcagcaggcgggacaaagccctgctgccctgggctgtagctgcagagggctggctggggagggagggctcagctgcccaagtgccaggcatatgtcaaatccaatttgggagaggatcttgttaagccttcgtattagatgacatcctccttaaaaaaaatcatcggttaggaaggctttgcaatgtctaccaagcacccatgctgaggtcagatagtgtttcctgtcaagaatagattctttatatcccatcggtccctgggttcaaggggatttgattagtcagatatggcttacctataagccttgctggccctaatcagtctctgcctttcaaaagctttgtgactcattttttgtgatcatatcgtccagcatcttcactagtaaagggcacagggctcttttcattcccgtcctgttaccctttcaaaattataggcacaagccagacacggtggctcatgcctgtaatcccagcaccttgggaggacgaggctggtggatcacttgaggtcaggagttcgaaaccagcctggccaacatagtgaaactctgtctctactaaaaatacaaaaaagttagctgggcatggcggcaggcacctgtaatcccagctactcaggaggctgaggcaggagaatcactcgaacccaggaggcagaagttgcagtgagcggagatcatgccattgcactccagcctgggcaacatagcgagactccatctcaaaaaaacatatatatacacacatatatataatagtatatattatatacaacatattatataattatataatataatgtatatatattatattatattatgttatattatatatacaggcaccaaaaatgataaaacagattctgggtctgtggcaaaacagtacttttatacatggcttgtgacagcataaattgtcctaacccttttgaaaagatatgttacagtaggtgtcaaaattcaaaagtatatgcactctgacattctacttacggagttttcccattaggatagtgtaactaaaatttattgcctatctattctgagctaggcacgttattctgctgctaattctgcaagtcaagcctttgacacttattgtttttgatgaggaaattagaacaatggctaagtgacttacctgatatggcaccattattataagggagaatctgcattcaaatgcagtctgattccaatcccgtttcttctcctacaaaacactgctttgggagaaggatttctatgtatgaacatcttcactgcggcattatttatgatagcaaaagctgagaaaaacaagtggctcataatagaagaatgttctagtaaattatgagaatttaacccaatggattatttttccatcttataaattttagtgattatttagtgattttgggaaaagcatatcatatatattaagtcaagataatagaatacaaaattatttctatataatgattataactatattaaaatgcatagccatatggaaaaaattctcatgggaacttggaatataaaagacttttttttaaggtattagtaactaaaagtgatttcccaaaatagtcattgttacaaagttgtatttgaagaaagacactagtcttagtggaaagaataatatattcagaatagaagagaccaaaatctgaatgctatctcttccacagtctaaatttatgaaactgagcaacttccctataatctctgagcctcagtctttttcatttgtaaaacagtgataatatttacctcataggatcacagtgcaagttaaatacattagagtaccaacaaatactgaactcatcataataaattcaataacaaaaaaagacatccctgataaatgtattagctaacaaactaaatacaaatgatgatccttctcaagcttccaccacctccaaagttttctgcagattttcagacgcaagacaggccaaaaaaaaaaaaaaaaggaaaacttcagcccacacacataagcatgtgtatcacagggcagccaagggagatggctaagtacaagaaactcactctttgaccacataattcttagctgaaaccagccacagatcaaatgcttcaccaacacggaatgccttatgtattaatccctaggctctgcagtgaagccagcatgtgaaaccaacccttccctggtcctctgggcatttacaagataaggccttgttacaggctgggtagtgatgctccctgaagcctcttaggatgaacgttctcactccataagacattgtaagctcgtgtctgtgggatgttgtgggatgatttctctagcttcaatattgctaagagtacaggacacactcaataggatgagacctattaatgttacttcatggtcttatggctgagcagctgtactctctaggcttgggttgcgtcaatcatgtccctatttcccaaatcaagagtagggtcaagtagattggggagtgagaaagagtggaaggcatcagacatgaaacacattcatcaggggctaagcaagcactgatgggtttcaagtaaccaacagtattttgatcacagtatcttcactgtggaatcttcatctgggctctgtgcaacaaaccccaagtgaccagtgaatgatgaccctttggctggagtgagtagactgcaaccccaaggagaggagctctttgcttccagacattgcccgaagagaggggcgaaggaagctggaggagtggggtggagagagaatattattgagattactaagtgtcaagtatgtgtcaagaataaaatgagtcatgcctgtaatcctagaactttgggaggtgaaagcaggaggattgcttgagctcaagggtttgagatcaggctgggcaacatagcaagaccttgtctctactagaaatcaaaaagttagttgggcatggtggtgcacacctgtagtcccagtttcttaggaggctgaggtgggaggacaacttgagcccaggaaatcatggttgcagtgagctatgattgcactactgcactacagcctatggcaacagaacaaaactctgtcttaaggaaaaaaaaaaaaggaagaagatgaaaattaagccaggcgtggtgactcatgcctataatctcaacactttaggcggccaaggcaggaggatcgcttgagctcaggagttcaagcacagcttgaacaacaaagtgagaccttgtctgtacaaaaaaaaaaaattgccgggtgcagtggtgtgcacctacagtcgcagttacttgggagactgaggcaggagaatcacttgagcccaggagtttgaggctgcagtgagctatgattgggccactgcccttcagcctaggcaacagagaccatttctctgaaaaaataaaaatacaaaaagaataaaatgagcttgctgatttagtactcacttcctgctaggaagatacagttatcctcatcatttaaaagatgaagagcttgaggcaccagatctgcatttagtcatccatcgtctatttgttgagcacttactatagtctagaaactgcctcagaggagacaggaaggatcatcacaaggtggaatttctcatttggtgcaaagctagttcatgaggttcctcagaacacactattccctgaagcagatgctcttagatcaagaagaaattggcagtgcagttgtccaagctggctgatccttcctgcctgcacctagttgaatgaaacaaacctgaacaggattaggaaaagtgctttaaatggttgcactttaagccatcccttagcacaactcttggctcatagcaaagggaggcacagctggcattcatcaactgggaggacagcatgttctgtcccacactctaaaaccaagcaggtggctctgggaaggtctgtgagggtgagagagagagacttctgcatggggctagcccttttcccatcaagtaggaagaacatgagatttggagcaaggacaaggaaaaaataatacccaattgaacctgactctgccactcacttgctgtgtgtttttggcaacattcctaacttcttagatccacatctgcagaaaggattttttggggggctaaaagcaagtcagggatgtactacaatttgcccaatacctggtacctagcatcattctttttcccagaataatgtttctgtgttgaaaacagtgagggttaagtgttatcctgagaagtggggagcaggttcagcctatgatgcaaagggtggaggcacagacacagccagcattattccccagagctcatggagcaatcgcctggagccaccaaaagctgtgggtaagaggaggcagacataaggtcaggaggcagggcaattagttaagacagtgaagtccagcaggtgccaggacaatttgaataattctgtccagctctgactgtatagcccagggccatgtctaatgagcaccccgtgattattgtcttgtagaatcgggtacctagagatttcaaggaaccacttggaacagagaaacaactttccctccgttgctcatttcagtgaccagtaaccttcaaggtcaacacattctttagagccaactccattttgcttttgtttcagctctcttctcatctaattctcttggggcatggaaaacaactacttgcttagtcaccccattgcacaccgactatccaagtggatagcacagtcatgtgctacattagccaactaacctgtcaacaattagagcatgtagtatcctacattaagtgttttggatggtacaaaaacaaagacatctgtacctatgtttaaggagctttgggaatctgaattgcagtgcactagaactcatgtttcccaatcatccgttcagtactagaatctccttaatgttgcccatgacaagtagtcactcaacccctgcttgaattcttcctgggactggaggttgcctaccacccaaagaaaccatttcatatagaccttagtgctgagtatggaggacagtggattctcaacagatgttgaagagatgaaggccattaattgatggctttaattgtttttcattcattcactaatccatttgttaacactccttctcttaacttctattcttgtgtggcttggagctgctcaaatatttgcaagtctaaccaggccgaacattttcaattcctccaaatattcctcatatggctttgttcctagaccctgtcctatcccacttccctcttctggataatgtttcttacaggatgtggcacttagaatttaacaagttgaaaacaccatatttcagctgtaacttgaccaacactccccttattcaggtatatctgcttttatccaatagcgcaagagtacatataactacataagtgaaaatgtgttccaaacacatataacaattttaacagcagataatggggagaaggctgatgggatccactctatatgggttttgaagccccaaactagagacacaaacccagagaagggcaggaagaaagggaaagcatatgatacccaacatggaacagcatgagattaacacccaaaccacttggtgtgagagagtgttgagagtatagacaactcttgacaaagtcacagagaaaaccgtttgacctttggtctcctgcagtcccttttctgagcacctttctccctctcaattcaatgggcaaggtggactgaccaagattacagttgcattgacctgagtttgaatccttgttttaccagtatgtataatgtcagaaaaatgcctttctctctctaggcctctgttttttatctgcataatgggaacaataatgtctccctcctcaggtggctattaaggaaggtaatagatagaacctagcacagggctgggaatttacttcagtgtcagtttttgcactctcccatgtgagtctccatcctcattagaaaaccctgctctgagtaaaggctttatggcagtgattcacccctcagtgtaggccagtgaggtggtgtaattcctgctggagtatgtctgctaaggtgttaaagaaatcttacattctagtcagggggtggcagtcaggctggtggtggcattttctttcatttcttaccaatcagctttcatgaagcctctgaaaaagcttctgcctgctctctctctccctagaccacctgtctttctccctaggggtgagatttaaaagatgccacccacaagcttgtgattgttgttagtatgtcttacctaaagggtagcatttcccatggcatgattctgttaagaatcttgggcctcttggcagtaataacaattcctgagactccaaagaattccttctgagactccgataccttttgcaagtgtgtgtggggggaggagggcgtataatatgtgtgtgtgtgggtgggtgggtgtgtaccaagtgtatgcaatgtgaaccagccattggttcaatgtgtgcacggaaataagtatgtgtagtgtgtagcatgtagtatgtgtgtggtgcatgcatatgatgtgttctggcagagaatatgcacctggaaatatgtatcgtgggtttgtgtatatggaaagtgtgcacacacacaggttactgtcagactccactgttttccccagattcatcccttcaattcatcaatctgtcaggatttttcattcatttaaccaacagtctttatataacatctatatgggctacacagtatactagggaagaggagagaaagatgaataaggtcttatctctggtggaaaaaagatatataaacagacaaattatagaacagcccagtttgtgtgacccacatgtataagtgagtacagccagagcacagggagggcagtgagccattcagagaactcacagaggaaacggcatatggttggggttttgacagatgaacaggagtttccccaatgttgaaatggaagaacaacatttgaagcagagagaatagcctgtgaaagactgagagtcatggataggcacctcattttgagggaaactttagtacctgaagcatgggtctcgtgggatgtggtaccaggagaggtaacctagggaacctggggtccagactgggaagggctttagttaaagagacgtgactgcaatcatcccaacagaagatgctgaagtcctgggctcagaccatagctgtgggggtggagaggagaaaggctggattcaagatatgtttcttagatacaattggcaggactggtgatggattatttgggggtggggccttaacaaggagggaagagttgaggatgactctgaggtttctggtttggaagatccactagataatgtcatcattaaccaagattgagaaaagaggaggaggaacagattccaggggagattagataaataacagcaaggagcaaatctccccatcagcttcaaggacattacactatccagtcctcagaatgaaaatcagctccgcagtgcctttgaatgccattctctagtgcaacttcttagccaggaccttggagaattcctgtaaggcttcaaggctcttcttctggtgtcaggctggggggtctcctggctcattttcatgtgtcatggtagttaagcatagtgattaagagcttaacctctggatcaggcagccatgggtttaaatcttccactgtcactaatggattgtataatcttagaaagtttacttaatttttctaagcctcagttttcttatctataaagtgagtatactaatagtatacacctcacagagctaccagtggaatcaatgagttaatgtatgtaagaggctcaggatggcatctcacacataataataattcatgaaagagaagtgctattgttagtagcatgttttttctttttctttattttctttcatgtgtatgtgctgggagtggggttggaggagactattgatcagagaaggaaacaaagaccaatcttctacaattccccacaccgacatttcttccagaagatcccattaaggttgatgcagtgcagtcaccatgcactgcccgttagacacacagaccagccacgttcttggccactatcagcagaatatgcatctggtccctttcctggatgtgggatggatttgtgattattgtttttggatctatgaccaggatccctgtcctggaacaaaggccggtccgggttaggaaataaagcaagattatctgaccctcttggccactgtgttccagccagctgagtcactccttccccaacacaggaggtgagtgtgtccttacatctctgcaggtctcttgtgagatgtccagactgtttggctccaatccagggaacgggtgctctaaggttgtgctgtccaagcctgaatttctggagcagcttcaagtggccttgagcatggataagaatcagtcctgccctggctgtgttcactctgctgacagacagatgatctttcatgatctttcattgtattacatagacattttctcttgcccattccataatctccattttggaggccaggaaagtgtggcaagagagatgtttagcttgggaacagaaacggttcatcctataagctgtctccatcctcttccccagtcatggctactcagtggagcccacagaattccttctgggctagtatttcaaaggaagcaagttttaatcaagtgttgaagaaagagagaaaagtaataaagggaacataatagaagggttatgggctttggagtcacatgacatcgattcgagtcccagctctgccatttgccgtctgagcttgccatgctacctaactctcccaagcctctgtttccttacctgaaaaaggggaaaacaagatctcttctacaaagcattattgtatcaagtgagacagcataaataaaaacactgctttgttagcctaatttttatacaacatgtatacagtttgatgtctatttttacctgttaaatgcattatgctcccaggttaatgcttagaggatctcttcctttacctcttattttgtgtgcctccaaagccagcctccacaaccccatctcctcatgcctgaatgtgactcattcttcaaagtccagctctaaagtcaattcctctatgagcttccctttctctacacagacacacacacacacacacacacacacacaaacacacacacaaccagccctggaagagcccactccccctctctatgaattcccacagcaatttatcagttcattccttctgctggttcatactttctaccttgtgttacaactgtggactacaagctcctgtccagccacaattcccgtctgttatgattgtaaactctgaggatgggatttgtggacagtttgttttgaagtcccccatggtgcctgacatagggtgagcactaacgtatattatccaattaatagacaaattaacattcaaagccttggttaaccagccagaacccctcattccacctgtttttctctcttctccagatgcacctcagaacagcaggcaggctcattcctcattcacacgatttcctgtgcacccctgacctcaaagcaattgcagtttttgtcatgaggtttcttgagctccatgctcccattcaagtactaaccagatttgcccctgctttgcctccaagatcacgtaagatctggcacgttgaaggtagtatggccatagatttgagctcctttctgatgacaattatgggggaactggataacaaagtcataaggatatgcagtacccaactacctgctagcggtttcacttggtatcccatgagagctattaattcaacacatttaaaactgaactcctcagccatcccacctctgcctctctctggtgcccactgctcctcctgcttttttcccagctcagtggaaatctgatacagtatagagtgtgtctgtgcacacgcatatggctcatttagatgagatattagacttagagttgataatggaatggttaagactttgggggatgttgggatagggtgaatgtattttgcacatcagaaagacacatatttcagggggtaggggagaagaggatcaattgttatgggttgaattgtatcttcccaaaagatatgttggagtgctaaatcgcagtaactcagaaggtgactttatttggaaatagggtcactgcagatgtactagttaagacaaggttatactagatggagtaaggtaggaccttaatgcaaaatgactggggtccttcttttttttttttttttctttttttttttttttttgagacagagtcttgctctgtcacccaggctggagtacaatggcaccatctcggctcactgcaacctccacctcccaggttcaagcgattctcctccttcagcctcccaagtagctgagattataggcgcctgccaccacgcctggctaattttttgtatttttagcagagacagggttttaccatg[131 bp omitted]acagggagaaacagccatgtgacaacagaggcagagattggagcgaggcatctataagccaaggaactccaaggatcccagcatcaccagaagccagaagaggcaagaaaggatcctccagccttgaaggaaaagcatggccttgccgatactttgatgttagacttctagcccccgatctgtgagacagtaaatgtctgttgttttaagccacccagtttgtggctttgtgatggcaagcttaggaaatgaatgcacccactatccttccaaacactggaaaggaacttcgcctgtactctcctgtcaaccccacaaccacccttgtcccagtattacccctccctcgtctctcccatctgccttctctgacccatttccaccatcacacccttagttcagtccatcctatcttctcacatggagcattagaaaggccttcaagcaagtgtccctgctacatattcaagtgccctccaatctacaacccacgctgatgctggagggacctttttgaaatatcaatctcatcatgtccctcctctgattaagaccttgaaatgtcacaacagctcctccgagtcttcaggacattgacaaaggagtctaagctcaagatacttcatgatgaaggctgtaaccatcaccctagatcacctcctgcccctacattcccatgcaccctttgctcccagcctactaaaatactccaacatcaaatgatgccatccatctaaggaacttcacatattatcatcttctacctggcttctcttgttcacataacaaacatttactttcttcagaattagttcagctatcaactccttcaggagtcttctctgaaccttctccctcctatgatgcccttctctgcacttttagaggggtcccctaggccacagtacatttctaccagggcactcagtgctttgctgcagggagccatctctgtatgaccaaagcccatatgggcacagagcaggtgcccaacaaatggttgttatcttttatttatttcatctgttatatttattttacttgttgccttttaatacttatttgtattatttggggccagccaatgtgctaaggacttgcttgcatcatttcatttccttttcctacccaccctgtcagtcaagcatcattatcttcctggtattcccaaggaggctgagtctcaacgagattaaataagtgctcagcacacccagatagcaagtggcagaaggggcacaagggagcgagggtccagcccaggcagccgactccaccacactaccagaatgaatgaaggaatgagccaatcatgtcaaagtctcgcaattaaaagttattccctgtggttcacggttcatcggaatgcaaatggagacctccccagttccacctgccacttcgatatcgacttgtttctcatctagagagagcgagtctttctcccatggtcctcatccgtcacacccagctacatgtgtctgtgtcaggggaggagaggaatgaacacaaatgttataaacactagcaggggcaaaagaggagctattttatcttctcagagcagagcataaaaccatagccagtgctgtatcccaagctttgtttacagtgtgtagtggtgaacagagtccaggcaggggaggcaccctcccccactcacacccaccccacaccttgttggaggcaaagaccaattaaaaacacaagctgctcagggagagataaatcaattttcatcagagcagcgctcctgacaccaccctgacaaatcaatatctttctccataatggagtcactaaagctgcaaccaagtcactgggaaacacaaagcagcctcataaagaatatcgtcaagtaataaaatatccaaatctgaatttcaattatccactttaaagggcacactaatatcttcagtagggaagtccatcaaaaattcatggaaccaggctccaccactcattcccagtcaacagctctgtgggcatctagggttccaattgctccaagttgtcggaagacaagtcttgcccagcctatgagaagaaggtagaatcccctagaacatggccctctccaagggtgataacaagctctgggcagacaatctggtctattaagattctctctgctggccctggaactagggagaggattcatcttcgcctggattctaggcagggcaacgaaatgaagctgctgagatcaagcagagctggcaccattacccagaaaccccacaggaacccgcccaacccagtcaggaggaaggcttcggctccactgcaatgtcatttcctgcttccctatcacctcctgccctccctttgtagactaccagggagggagaggggccagactcctggggaatggcagccagctcctggcaggtacctcttgctcagcagtgggggtaccctgggagtcaccttgtacaggcacctacctcttgctttccacctctgagtcaccatgacagtgacaatgactgcataggtggtgtattggctaagagcctggagtctacaaccagatagtctaggtccaaatccagcagctgtcacttacaacctgagtggtcttgcaagtctcagcttttccgtctgtgaaatggaacaatggtctcctgcttcttaggatcattgtaaccaaaagcaacctttactgaaggcttgacctggactagggatcatttgaagctttttaaaaatagtaagttacaggctgggtgtgctggcttacacctgtaatcccagcagtttgggaagttgaggtgggcagatcacttgaggtcaggagtttcaagactagcctgggcaacatggcgaaaccccatctctacaaaaatacaaaaattagctgggtgcggtggtgtgcatctgtagtcccagttactcgagaggctgacacaggagaatcacttaagcctcggaggtggaggttgcatgagccaagatcatgccactgccctcccgcctgggtgacagaagtgaaaccctgcttcaaaaatgaataaataaaaatattaaattatataatcttcaaaacaactgggtgacattggtattatttttctcaccattttacagacaagaaggttgaggcacagagattatgtaacagaaagaatacaggaaagcacttagcacagtgcctggcaccttgtaaaactgtaatgggtgacatcacttactattactatcatatttaatatactttctaagcagtttaaaggctgcttcacgcaccgaagcaccactgacctacacaatagcattttaaaaattcaaaatactacaaaataaccactccaatccatacactttagtactgctagggagatcactctaaaacacacatatggtgataccacttccttatttatggctcagacttcttaactttgcagcaaaagagcccccttaatctgatgggtttgcctgttcagcttcagttatcatcccacttacagtcagttctggtttctgtaacagaataccacagactaggtggcttaaggaaaaataaacaaacaacaacaacaacaaaaacacatttatttctcacacttccaagtctggaagtccaagatcaggatgccagcatggtcaggctcttcttgggggcccccttcccagtttatacgtggctgctttcttgtgacattcgcacatcatggagagagagatctctagcccctcttcctgtaatgacgctaatgccgtcatggggtctccacactcattaactcatctaagcctaattacctcccaaaggccacacctccttatatcatcatattggggattaggctttcaagatacaaattttgggggatcaccaacatgtagtccataaaaatcctcagtgttccccatgtcatagatcacaggaaatgtcctgttcacccacacatcaggacttctatgtatgtcatctctgcttgtagtgcctttccttccctattctggaaaaacgtcttcccttcccttccagagacacctcctccacaaagccttacctataccccaggacagactcatgtccttcttcctccgtgtccccattgagacttgcatgccctcaccacagtgctactgacacacaacagcactgtatgcccagtgtctgccccccgcttcacaggccagcatccgctgaaatggccaggccttgtcattagtttatcccaggcacccagcacaggtcctggcacacaatgtgtatacgtgtgcgcatgtgtgtgtggtttatattgtttttatttctaattaacttgggtgcagatgatgaaacatcataatcttgatcagaagacaactgaaggtcttaatgcagtcttggggacagcaccaattccacagaacccactctagccagtgtaatcagaaaagtaatttgttagaggatgttaggtagctcatggaatctccaggagaccagagaaccagtctcagaagggaatagactgaaacgatacccaaatgacagtgccagactgtcccatgggatctctgtggctaccatctctgggctggagcacttcagatcctctcagtgtattttaataaatgagtaagacgatctgtaggaatgattcctatcttataaaggaggaagttgaggtgtaacatgattatatgaattgcccacagccccacaagtagtaggttgtgggattgtgttctcatgcctagatgtctccacaataccacagccgctaagacatggtttgcgggtgagctggagcttctgaaactgaggatccaggtacgagctcagataccaaatcctgagctccagagagcagccagagggcagggaggtaactgtggaacacaggaggccatgccccccatccacgtcactccccttggtcacacggctatcccacatgtcacagcctccactggagcggagtgggactgtggactaagctttctgctcaatgaagtgtgaatgcaagtaaagtgggttaccttgggtaggcacattcaagagctggtgtgtctcctcccctcatctcatggcaagacatagaggacccagtggaggactgaaggctccaggggaagacagagccattatacaggaagaggcttggccctgagctgtcatgaggaggactgcctatcaaagccttgattggattgtgatgtaagcagaaaggaagtttattgtgactaaaggctacaccagtgagacttaggcatcatctgtgacagttattagcccactccactgcctcatactcaaaaccaagcagccaagcctcattatcccacagcctggggtggtggaggaaagtacggaataaataaagcaccccagaggtgagatctatgcctgcttttcccagactccaccagcctgcctttcctgcatggggctgtttagcctcagccttctgaacatgccaaggacctcagtcctgtacggcaacatcagggagaacactgagagatgttccctcttctccacttctctctcagcctccctagggagttggctgatccattacctctcatccactgtcaggacagagctaccaactcttggtcagcagtaccaccggcctgctgcttagagcacagatgaggttctctgactctgaacgaagaggcaaggcaggcacaggcaggggatggaggtggatgggaccacacagtcttctcacaatttagtgggcacatgagtcacctggggaccttgttaagctgcagattccgtttctgcagagctgagcggggcctgaggcgctgcatttctacccagcttccaggtgatgctgatgctgctagtgcgtgaaccatgtgctgagtagcccgggcacgtccctggaaaatacacatccctgacagggagcacaagcctcttcccagattattccaccctccaactcaggacagaggggtgcccttgaagagtgtctaagaaattaaggtgggagggcccatggataagcaatgaagcagtctgcctgtaggctcccagtaagcgtttgcatttggcagaatccacagctgcaggtaacagtcacacaactcaaatcagcttcagtaagagggggtttgtttttcgttatgagtaagttttctatgtgaaaggccagggggtcaaaggaggcagtatgagcatcggggcttttcaaactagaaatgaggacttcctatcacaagatctgggtctgcctctgcatctccctgcctccctgccttgcccagtctgtctctaactctcatgattgctgatctctccttagcttcattctgaactctataaagcaaaaaacaagatggtcttgggtttaccctccatctatgacattctagaatttgttctgagtccgtaaaacaccaggctccagacaatgtggcccccacagccagagtttcaatttagttgtggatgcatcccctttctcttcccagaccatcagcctcttcccatttccaaaccagtcatgcagcaatcaatttttctctacgtataggtagcagaatcgagagggaaggcatggagtgcagggacccctcttctcagcctggacacacactctctccctcagtggggcagctgggggcttcagctcccctgctcttcctgctgcaggacggatgcaacagctccagggaggagtccgatgccacctgagccctccacaagaagggagggctgaactcaagaatacaagaaactgtcccatgcaaggaaaagaatatgataaaagaggaggctgtacaaagagcaaattcagggatccctggactggcactggctcagagccaacctggctttctctatgctgagcatcccgggccttgggcaaaggagactgggcctgctagatccatgtgtgagctctaccttattctagctgtgtgactgtggggaagttactcaacctccctgaatctcagagaggcaaggagagcacactgacagccacaaatatataatgatgatgataccacatcccacgggtgcctaacaccttgtacaatcttaataaatgtttgagaaaaggagaatgaagaaaagaaggaggtagaggatgagaaaaagggaatcaaatggggagtaaaaggcccaggtcatgggtgtgaataactaacacatcagaagctgtgagggtttattgggtaaagggaggcaaagtagtcttatcaaagtggcccgtgggattccactctgccacaccttgtccctattgagaagttcagctcactgaattcccagggaccccaggtgcagggagcctcataggacctggcaaagcaggtgaagctgttcttgtaatgcatcaagggaaccatgaacctccctggtcccactgtgcctgccttgggccacccgctgcagtgtggttcactttcccctgcaaaccacacttattcaatgtgatagtagaggaggaggggcctgtttatgtcactgcatgacctgagggatgtcacttaacttccaagagcctcagtttcctcatcctttcagtggagaagggaaaaagtccctgctctgcctaccccacatttatgggagtagttctagcactagaactgtgcgctagataagcaagttattattgttactgcctccagcactctctttaaatgaagcatttcttgatgccgtgttactacatgcaaaaaagtcagcattggcttttttccccttttctacagaaagtttggggctggaggaagaatgaggttgtgtcagcagagggggtagtctcggtctagctcagctccagctgcacatcagagcctcctggggagctttaaaagttgccagatgccccagcgccaccatcagaaattctgatttaatccacctgtggttggggtttcggctagttatttttcatatcaacaagtggtttcttatattgagaactcctgggctccacagcagagggagtgaacatgaatacaccgaaggaagagaacactctaaagatcagtgtgcagagtgatgcctgaccccctaccctcgagagcacgggctcatgaactatgagaataaaaagcgtatgaatctagtttttaatagcttacatctactaaatacctattacacgtcaagcactatgcttagcatgtgatgtcctttatcccatttaatcctcacaacagcctaatgaggtggggactaggatcaccccacgtacaggtgtggaaactggcagagatgactttatatggtggaaccagcatccaagccccactctgcctcactctgaggccaaactctccacttgtacagcataacaagccttggaatacaatttcttttcctgtaaaatgtaagaattctggggaattattgtctgtcagaatcaactttgggaatcctggtaggacatgaccgcatttgatatacacacacataccacagggtaggaacctcttccacactcttaaagggccatgtcccatgttatacctggaactaataattcccaaaattattctctagagtgttaaaaggttcttggctaagaataaacatcactgcctatagtaccccctcatggagactcacagtacctgtcaaccacagcaaaggtgatggatgagaagtcctgccctgaggaaatctaagtagttctatttcaccaagatctttctcaagcttctttgtctacagaagccttttataatggaatacctaaaacagggcatactagtagctgcttccaatcttcttggatccccagatcaaagcttccttaaaatctagaagacggggcatcctattatcaatgaaccaagtacagaacaaaggctaaagctattgtcaccctccagacataccatgtcctgcctctcaagggggtccactgagctgggagggatgcacctgaaccagcaaggagctggcccagtggagcaggaagtactgtcatccaacagccaggtgagtccaattagagaacgataaagccaccatggaaacttgcaccttgccatttactttaaggctattgctctgcactcttcaggctatctgtggggtttaggagttaatattcatttgcacatcatgaaaggactaaattagagacatgaagaaagacagaatgctctgactgagcctgtcacacacttttcaaggcgagatcattagaggcagtcactgccacccatgacttcacccagcaaagctccttaaacccttaccctgtgcaggctccaaagataatgcagtgaatcagattcaaccactgctttccaggtgctgaaatcagattcaactactgctttcctcctcatggcttacgaggagatgcaacagttatgattttgaatccgtataaatggggatatgggcaagggctcaaaggagcctggagaacacagaacctatatctaactagtcccagtgcaacacacatttactggacatcatctatgtcccaggtgttgtctggacacacagggaaagagacaagaaagatatagtccctgttgaaagacaaaggtgtctttggtcttataagcttcaatgcccacacctttcctcaaacagagtaaagcatttcctcttccaaactctggaattcccttccatgatgcttctcacaccataatgaatctgttaggatgcgttttcccatctgggcagcaagctccccaagggctgggccctgcattacccatgtttgcataactagtgcatcccttagcaactgcctagaagagagcagatgctcaacaaatgctttttgaaatgaaaagatgggtttcaggggaagggaagcttatacatgaaattattatacggccactctgatgcctgcccttaggtaaaaagcaccaaggcatttattcaatggacagagaacaagtatttaaggaatgagtacagcgagtagggagagatcgagaaagccttcgcggaaaaagctgcattggagatggacattagcagatgagcagactttcaacaaaccaatgctaagggagagaaaaaggaggaattctgagaatgaatagtaggaacaaagctgaggggccagtggggaaagaaagccttcgggaaagagtgaattgtatattacggcagagttaggctttgcaccatgaagaattggaaactgagcctcgaaatgcagattggcaagacaatagagagccattgatggactgggacaaagtagtgacatattgagagctgtgtttcagacagggccatttggtcatgggaataatggggatggaagagagagaggagctggggaggaatcaattagaaataaccattctgagtaggccattgtattccctaaataaactgccagccccccaagctccactgcctaggccccagaagagtcattttggcatcaggatagctcccttcctttggccatcaggacctataaatagccacataaaggtttctgcccccagctcagccacagaggctccagggctgagctgtcaccctccaggacctgagcaaagccagccctgacttacccctgcctgggcacgcaaccattcctggggggaagccagcttgtggtctgctgacagcagggacatcttcctgagcctaaaccctgtccacaaatgctctagagatatttcacactctaccacaaaaacaaaggagaaatatttcagtctgtggctctgcgtgcctttcctttaatcccactgagacccagggtctgctgggcaggggccattgccgaggccccctgtccaaatgggaccagataaacaagaggccctgaaaggtctgagaatctggatcccagcgtgtgaaagcctgagtgctggcccactgacgaattaccttgggtctagcttctccattcttctctgagggacatttaggaactctggtctctcttggggcagtgggacggggacattttggaaacttttgtgacaattgtaggtgctgtcctggaatttgagacaccatctcttatgccctataagtttgatctctgggctttctacaggaggatcataatgcctctgcaggggacacaagaatgtaaagcctggctaacctcagctgggatctcaactttgccacttaccagagtatggcttcagaaaagtgctttaacttccttgagtttgaatctcctagtgtgtccggagttggttcctcccggtaagttcgtggtgtcgctgacttcaagaacgaagccggggacctttgtggtgagtgttacagctcttaaaggttgcgcagacccaaagagtgagcagcagcaagatttattgtgaagaacaaaacaacaaagcttccacagcgtggaaggacaggtagacgggttgcggctgctggctggggatggagtgcgagccgggtggaggccagcttttattcccttatttgtctccgcccatgttctgtttttgtcctatcagcgtgtcttcaagggtctttcttttttcaatcctccctgcaactggctacttttaggatcctgctgattggtgcgttttacagagcactgattggtgcattttacagagtgctgattggtgcgttttacagagcactgattggtgtgttttacagagtgctgattggtgcattttacaatcctcttgtaagacagaaaagttctctaagtccccactcgacccacgaagtccagctggcttcacctctcactagcctgcaaaataggaataacaactaccttccctaccactgtgggctgttgttaggtaacaagtgtgtgtgtaggtgttctttataagctgtgaagtctcaggtaaaaaatcaggccatacttcaaccatccatcctggaagcctgtgctcagctgacctctgtagacagtgagggtagggctccctagaagcacagtctcctccacagagggacctaggccccaatctaacccatcgcggcctgtttggggtcaccccaatttaataccacatctccctctttcattgtgagagggaactgagatgatatatgtaaaggcagaagagaactaccaagtatttattacttactgttagccagactcagtgttgggcatcaattatctgatttaattaaatgttcatactgactctgggattgataaatagatgtatgatatgatataaatacatatgattgatttcccattttagaagcaatgaaagggtatgaactcagatttctttgccttcaagcgtctttctttttcttggttattttctacttttatttttgtggtgtaggggaaggggtagtgtccctgggtgggtggggggcagagccatggcaatgctcggtaaatggttctttcctctcacctaaaaaaggtgctgggagaagctacacccctgggaatccctcatgctctggaattggcccagggtcaggctgtctctgttgagctggctacagaacatcagtgcattctcccaagagcagccctggctctgagctgtgggacagaagcccaggaggctgacattcacacgcatggccacaggccagggtaccagtgatgccaatgagcctggtactcacctggcttgaggagccttcgtagggcctggcaccagcaggtgaaacattcttgtgaggcagccaaggaaacccacagcttccctgggcctcactgtgtctgctaagggccacctgctgtatgcaaagtgatttctcctgcaaatcacacttatttacacctaaggtcaactaagtgacataggggttttacatcccaatttacaggtaaaccagtggttctcaactgaggacagttttgcccctcaggagatactgggtaatgtctggagctttgcagggtgaggggtgtgggaggagcacttccagccagggatactgctaagcatagtgtaatgcacaggacactacagtttgtccagcccccatcacaaagaatcctgtggctcaaattgtcactagttccaagactgaaaaaccctgagagaaggaaactaattctgagagatacttaccaagttcacatagctgatgagtgctacagtcagcttccaggtactgattctctaattcagaagccagcatcccttctttatatctgtaatggttaatgcccccttgaagtctgaaatgccccaaaaggaaatgctgtgaagccttctagagtcatgttgtagttggcatcagaggtttgggggtgaacaatgatttaattgcatttgaaatgttgtaaatggtcacttctctctgtgaccgccctatcaccctcaggcacaacatccatctttaagtactaatggtcttgtcaaatgccccaaagtccccagaaaggggccacattgtcctctcaccagagctggacagtcacctttaaccaagtccatccgggcaagttagatatccatgcctgtccccaagagaaataatccaggtcaagtccctggcaaagagtaaatgcacaatgcaggaaggagagaatggaaggaagaggaatgggagtgcagccatcgtagagatgaggctggaagcaccagcaaagcccaggccacaagtgccagagaaacctagaagggagactttgccctgagtccagtgatgagacatggagaagttctaggtcaacaagttatgtgattactttctcaatgccagtttgcaccacatactccagaatctgtttctatttgcgccaatcccaagattaatcaggtctgacctcaggaaggaaaccctctgcttatgaccactctcgtagacagacatgcagccagtcatttctaggagagggagctcacagtcaaactgcactccttactctgaatcctggggccaccccctaccttcgcccacccatacgtaggcagtacctccttgggccccttcagttcatacccctcactctgccaaaaatataataatagtaatgccttgaactttggaattctaattttctgaacagctatagccaaccacaggtcattactaaaagactggtgactgtagagtgacatttgagaccccacagacaggcttgtcagaactccaaagccaaatggaatgctttgctagaagtggaggctctttctgctagataagttggaaagctcttaattaataattccaaaacagaacttcacaacttctctgagttctggccagcaaagcccagccagcgatggcctggtcagcctacaccaaaaattgcacttgtcttccaactgtgaccaagcagtcccaaacaggcctgcctgctggcagctgaatcactgaaagcaggaacatggcatagaagatgagctagagatagaaagtggctgaggaccaagtctagggctagcatcttcgtaggagaagatcagtcagcaaacctagcactaggtttggcttccaactctccagactgctggttctcttgctagtagttttcaatcttggctgggcattaaaattaacctggtaagcttttaaagtcctgatgcctggacatcaacccagacttctctgtggcgagacccagacatctgtatttttttacagctccccaggtgattccaatgtgcagccaaggttgagaatcatagacttaaatcttccctttacaccttgattaattctttcagcacaggatgatgaagtttcccaccacctgaaatattgtttatagtctacagtcagtaattcacatcaaggacttgcactccacaaatatatgattaaaaggtgaaatatccactaaaggcaggacttgtattttaaataataataatattaatagtaaaacaatcaaacagaagccattcctttatagtatctttcatatctaaaccatcctcaaccaggatgctgccaatcattattctaaaaaaaataataatgtggtcatgtcattgagaatgctcaatagctccctattgcctgcgtcaatcaaaaaacaattataagcacccccaccaactgaatggagccctcttggccaagaggatcctggagaaacctgaaaaactagttcaggctgtcatgacagggcaggagtcagacaaacctagttataccctcctcctttggagtctaggcacagctgaccagcattaacattaaaacaaagattataagactgacaaagcagactctttgtagcaataacatactaaactccaacttgactctgacgtaacatcacatgacagcaggccctgaaggaaatctcagtattttaccccaaaatacattttctttgacttattttgaaatggccctgcaaagccatctcttatggggaaaatttgcattctgtagagaatccctttccccttccacatatcttcttgatccaggagagattttactaagagtctgacaccttttaagagacatttactatccattatctctgaagccccttacctagaggctttatctacataacaagaaccttggcttccacaaccctacttacttaattcaatgatttccttatgctgacttcaactcttgaggcaaagcttaattctttcaatcaattgccaatcagaaaatctttgaatccaatcatgacttggaaggcccccttccctttgagatgtcccatctttctgggctggacaaatgtgttacttacattattgatttatgtctttgcctgtaacttctgtctccctaaaatgtataaaaccaggcagtacctcaaccaccttgggtacgtgttctcaagacctgtgtcatgagccgtggccactcatatttggctcagaataaacctcttcaaatattttggagagtttggcttttttcatcagcacagacaatactcaaacatagtgggcctccctcacagcctgtctctggcctgctcatgcagcattgtctcccaagcccacattttgcatactctggacccacctgtcttgtaacttcattggcacatttccctggccctggaagatcctcacctgctcttttcacttgttatattctactccttttgaaggcagagctaaaatgctacctttcccatgaagtctttccaatccccctagaaggaatgaatcactctcgctccctctgcactagcttcccctgccatgcacagtatagataattctttcatgacagttctaattaaaattatttgtttgtatatctgtaaccttctaaaaatatgagattccactgagagcaggggacatgccatatccatcctggacaaaacagacaaaatgaatgaataagtggacatcaggttgaattaactgcacatggtagacatgtgattgatcctccacaattgagactttagccaatatgtgctatttgattccaagatgctttcccagcaaacagactgaattatattttcccaggaaggtagctttaaatccatcaactgaaatcatcattatccacattccatgttaattctctaggtttgttagcatgccagataattagtgtccctgtggaggcaaggcagagagcaggttgtgtggaggaaacatctcatttgtggaccatcaggtggagggctcctgggcacagtcttctttgtgtccgttgggtgtttctcccctctgtaagctccaccccacatcacttttgtcttagtctgttcaggcagctataatagaacactataaattgggtagcttacaaacaacagatttatttctcacagttccagaggctgggaagtccaagctcaaagtgctggcagattcagtgtctggtgaaggctcgtttcctgattcatagatggtgccttctagctgtgtcctcatgtggtggaaggaggggtgggtctctctaggacctctttataaggacactaatcttactcatgaaggcttcaccccccatgacctaatcatctcccacaggccctacctcctaataccatcagcttggggttaagattttaaaatatgaatttagtgggggacccaaacatttagacccctttgcacccacaagtcccaccttctagagtcaaagccagtgagctgttgaattatctaattatccagggaaatgcaaactgggagcagaagaatacgaaactaactcctccgagcagaagctcttcttcatgcaccccacctagaaaggcagaataggggagtgcacgagaccatgagctgtgagaccttgtcaattgccttcatcttttgtacctcagtcctcaatacagaatgagaggagtaaaagtacctccccgattgtgtccctgggaggatgcaatgcattaaaacacatgcggtgctttaaacattgcctggcacatagccaatgctcagtaaatgttttaccttcatcattaattcaggtagtttaattaaatgaaatccacatgtgaagttttcctttgctgccccacctctcccactcccactgaggagggtctgctgcatgaattccctggagatccacacatggaagcacaagcattgggtgccaattaagaaaaagtgccagggaagagacaagatgagaaggggcaggctaaatgattaggatccttacactggacactttctgagctgccttatgccacatggtcaatgctgtcactgcccttctccaccaaccctagtgcctgccacctctgctccagctctgcccaggctctggactagtgagagaaccacatctgagcaataaagagtcccaccatgggatatcacgggatccagaggagtctagttgccttgactacggctgagtggagtcctaccaaccttcgctctctcctttcacccacagtcattctttcagccattgttcgactctagtgaataccttatcccttgtccatctgagaattaatcatccctcaaagtccacctaggcaatgatcacacaacccaatcctctgaaaaccagtaattaaaggataggaataagcatctatcttgcttacataggaggaactgtagtttttccccagttgatgagtgaaaattcttccttataatacaatgtcagctgatacatgtagaatgatagaattgggaaatcactattttgaaacctctaatgaaattactgattcaggttcaaattttagcacaaactgaatgtttaaaggtattgtggtgtcatctgacaaatgatgggagatgatttgaagatgggagaggaggcaatggagctacctagcagttattatcttagccaaatgatcaaaaactagcatctctagtgaaagatctagcatctctattgaaagaaattctcagtttggacctgaatctcaccatgtttttaaatctaacttctactttatgaaaaatacagggaagggaggagcaaattaagtgataccacatggaaataaacagatagattcatatgtgggatcattgtataggaaaactggtttgttttcttccaaaagtcaacactaaacgatgtatgaatagcagcattatttataattgccaaaaaatggaaatgactcaaatgcccactaactgatgaatggataaataaaacgtggtatacgatgaatgcgtaaataaaatgtggtgcatccatagagtggaatatcatttgataataaaaagaaaaatatgaacacattctaaaacatgattaaaccttgaaaacattgtactcaatggaagaaatctatcacaaaatgcacatactacatgactgcatttatacaaaatatccagaatgggaaaatctatagagacagaaaatagattaatgatcacctagaactggagggggggggattgatggaaattggggaagcagggtgattgataatgggtacggggtttctttctgaggtaataaaaatgttcaaaaattcagaatgccttgaatgcacttaataccattgaattgtacactttatatgggtgaattgtatggaatgagaattacatttcaacaaagctatttttaaaactctgtgtgtgatgtggattgggggggtgagctttttcattaaaagagacaaaataaccaaatgcaacacatgaatcttgattgtatcttcaatgggtcttgaattttaaaagttagaaaactgtaaacaagttttggggacaattggggaaatttgaatatgaatgaagggcaggctggtagcagccagagtgcacacaaggagggcaccagagcgaaggagaagagggcatccaagcggaacagaagcccagtgggataggaagacgggcgccattcaagagaattgagtgtaagtaaataacctgagggtaacacgacacaggtttcctactgctagagaaagcggggaccaatatggaaggaggaaaagccagagtgaaccctgtgctgttagactggaataagcggcatctgtgtaaattcctggtttgagatgtacgtgtaaatgtagatgtaactatcctagctctgtccactgagaaggtctggaagcagctacaccctagtagtactgagcatacctacaactcagatcttggttctaaatagcatttcctgttcaaatgaaccaagatttgttagagaactggctgattaaagggctgaggaaggaaatgaagaaaatgaacctgaacatctagctgcacaagaaagaaaaaaaactttcaaaaaatacagggaaatgtcaaaagcacacaaagtcagctggaaggggttcccaaatgtgggaaaatttgagtttcaaaataaacaatattatcagactgtaacctattgaataaaatagaaatctatgagtctacaccaatgtaaataaataaagagaaaaaagagaaagctcttctgtatttcagaaaaccaactaataaatgtagaaaggatgatggaattcaaaaaccatcatttggcaaggttcattgtaataattcaagcaagagaaatcaatggatgataaaaccagagggtgagacagtaataagaaatggaattttacatagtctcaaagtatctccccagaagagacaccttcatcaagtgataaaacactatcagtattaggacaaatagatattgcatgcctccagataggctatgatgagaattctgcatcagttttgtgaaattccagccaaaaaatcatatctggtgtcttcaagaggaaacattgaacaaaccaaaattgaagatcattgtgcaagatgactggccttgaattattaaaaaaaaaaaatccagtacatgaaaatcaaggtaaaacagaaacattgtaagaataaagacagagtaaggggaaccttgacaactgggaataaggagtggtcctggatggactcctttagccatgaaggaccttagtggaccactgttgaacttctgggtgagggatacacaggaattcttcaaactagttttgcaacacctatatgtttgaaattgtttccaattcttttttaaaaaaagaataaaatttagctattatctccttttggaaaattttcagagcctaccatgtgttacctctggaccttgggcaaactttggttattttgtgtaaagtaatcttttatttactgtttagcttccccactaaaccacgagctccttgaatgtctagactgggtattattcttttccacttctctcgagcctagcacaatgtctagaacatagggaacatcagtaaatgtttgttaaatccatgtgctgggcaactcataaccctggagattggctggtagattcctggacatgctaagcgttggtaaattcttgcagacataaaactgaaatacgcctctctgcaaaccagagagcatctgtctgccctgcagcaatgagctatgtgtcctgcctgaaacagtgttctgcatgtaaggggcacattgcctgaaatcatagcctccaagaaatggtgttcttgcctcattgctctggggggaacaatggcccctgtttgtttaatctcagcccattgtggcagccttgactgcacagagctcacctgtgattcatgtgaatgtcacttgagctcccaggagtttgcagccataattcaacattttgttaatagccacttaaaatgtccctgaaatagctaacaggcccgggggaatgaagtattctgctaggaaatcattccaagaaagccatcttggcccaaactttagaagattctattacttccaatgccttcttgcactctgtgaaaatacaaatgggcatctctcagggacaccaaggaaaaagtggaaactgaaattacctacacatcatagtgggcatgctggagaccctgcccaatcactcctgctccaagagaggcccctcaactgctatatcccgtgaggaaggggaaatacaagggaacacagtccagagtattccaagaaaaaaacccttttcagagaacagaaagaaagagacagaaatacatatagtgctggattagaagtcaaaaagtttgtgcgtaggtggggatgacaagagagagaacggtgagaaaaatctcacataggttgaggcctactgtgctatgtagtttacaaattatttaattctccccaaatctaattaaacaacatactcagggtcatcaaagttgtatacaattgtagtgtataatcattaggtcattcagatagtatatgaatcaataaatagtctctctccagagctccagctcttattcactgccatttgcaaatttgtcaattacagcaaacttgggctggacattcaaaatcaagtcactgattcagaggcagaagttgaagctctcaatgctgacctcttgccacctgcttcctgaaacatatctgtttgctataaagttatcatttcttccacctagagtgagatttaaaatggagaagtggaggtggaaagagctagtacagcagaatcacatgcacacctggatagggatactcatttcctcatgtgagacccctgagcccactagttggcaacttggagaaatgtcaagtgttaccctggcaagaagagacttctccaggttctctacattcctgaagcaagtgctatagaatggcttggcactccacctgcacgttcccaagcacagaatcagggtaagagagaatgaagaattagtgcagactggcagagctggaaggttaggagtatcgtaattatatgcccagctctcagagtgactggcctgatttcattcagctcagccctgcacaaaaaaagcatgatgtcttcacagagaacccctaaagggaatcagaaagcatgaactctaatccctaatggtgccactttcttactgagtgacgttgtgccagtcactaagcttctctgagcctaacctatgttcaactgtgaaatagacatattggtacatgctatggtttgaatatatatagtatgtccccataaaaactcatgttgaagcttggtcccaaatgtgatggtgttgggaggtggtccctttaaggggtgattacatcattaagatgaattaatgtctttcttgctagactgggttacttcttgtaggaatgaattagttcccatgagagcagattcttataaagcaaggttgcctattgtgttttgccttttttgcatgcatctggttcccctcccatttctctgccatgttttgatgcagcacaaggctctcagcagaccttttcttttgatgaatattcaggtggtttctgggctgatgtcatgcatctttggagatgctggtttcaatgggagtacagccagaacactgggcgtcaaacttgtgaatgaaactttgccttttcagggaaagatgggcttaggatcttatagtcatgatgtttgcatatcacaagcaccatgtctctgggatctgggcatatgtctgtagtaggcctgactttccagaagcttccagatgtggctgctcagtgttgagtttcacatcctgcagaaccataagttaactaaacctctttttttttctttttataaattacccagtctcgggtattctgttatagcaacacaaaacagactaagactaagacaatacattttccactttcagagttattgtgaggatcaaatagcatcttagaaagcatttaggatataaaatcagatacctcattcatatcctgcttccaccaattacaagataagtgactgtaggccaattcttccacttttctaaacctcagttttttccatacaaaaaaaagatatgtcaactattatatatttcacttggctgttgtgaagaccaaatgaagtattccatgtaaagtgcatagaacagtgcctgggatacagtatgtgctcagaaaatgttagccattattaacaggttttgtaagctacacaatgatgaacaaataaaagaacttttatttgtgacaagacctgcatgtctatagtagcttaggctcaactataatagcaggagctgggtccctggcttgatcacagcctcattccccatactttctggggacttcctgatactacactgtcaatatagatttccaaaaaatcgtcttgctcctggatctcctgtcactatgttgtatcaccagctcatcttagtaataataatagtaacaacagtaacaaaacagctgacattccacatctgggataacttttaaagttttacttatattatttcactcaattgctgcaaacaatcctatggggtaccagtattattattattatttaatagatgaggatattgaagtctggaggtgttaagtaatttgtacaaggtcagggaaacctggaacctacacctgtctggcactaaattccatgattgtaccacgaggccaaaatacctcattatgttattatctcaagtgccagagctcttcattcttccaacatttgccaagctccccaagctcagatatccctttgttgtctgttatcagtgctcctgggcaggacattctctctgccagattagcctccttccaaactcctatagctgggtctatctctagccatactaaacctagagttatctctagtccataaacctctcagtctctgcagccctccacatggaacccggccatgcccaaccacaacccaagatttgctctctagggttggctctagctcccagaatttatgacaaattcctctgggaactgcctcttgaggagccatccatacacactttaggatgcccaggtcatttaacagccccttcaatccttggcttccaccagccacccacttcccacactttctctggatgaactgaaatatccactcttttgtgtctacagtctcatatggcaccattcttattcctgacttctgagacacttagcttcaagactacacagtattgggaaatggggtgattctgcagtctggatgtgctggattgcatctattatcagttttttttccagtgctatctgccaatgtccctcacctctgaccccaactatctgtgcaggaaggaaataaagactctcagagttggaagtaactttagaggtcattaaatccaaccctttacctgacattgatccacatctgcagcattgccaataagcaattgtctggcctcagctagagctgatggcagggtacagggtgctctagactcctaggacaactccttctagtctgccgatatccacttatctaaacttttacccacacattggtgctagctctgctccctggcttcacacagagaaagtcacattcctcttctctatgattgccttcgaagtgttttaaaacagctctcatattgcccgtgagccacccacttcgcttttcatgctaagctgtctgagttctttcatacgctcctcatcgctcgtggtttctgtgacatatgaggagcatcacctctggtcagccatacatctctcactgccttctactttattgatgggcccaggacactgccaacatcaaatgcatagcctcctcttcatggcttgaagccaggctgatgcacattcaggaagaaatggaagtgaaggctggtagaagggtaggaaagggaagttttcagagagagcaaacttaggaaatgagaatgcaggtgctgataaaagtgtatgctagaatgtgagcagctgagagtcacgtaacagctgggagaatgggtatggctcagctcttcggagaagggaaaccttgggaagggctttctttgggcaaacaactctaaggggaacaaaccagctgtgcttagagtagtgaatcccaatcagagagatgctcatttgagttatgagggccacccttgggaattgttatcgccgtcttgagttgaaaacacagattttgaaagtcccaggtttaaaagatttttgaaaaaggtatttttttctttctaaaccagacttaggtccacatgcctagactattgtccatgttaccatatggataaaaaagctaaaactaatcaatacacaggttgggttccctatcagagcctgagatggcacaccttctacaggtgatttattgagggagtgttctcataaaaagcctagaagcgggaaggggaaggtagggcgggggaaaaggtaagcatgaatgtggtttcaggagaagtccagctcagcctgatcccacgggaaacactgagtgtaaactgcaccacaatgtattccatcttgaggtgagatgactggcatttcctaatcctgtcagtcagtcactggccactggctgcccccaggtggtggggaggtgaataacttcccaggtatctccagaagaggcagcacctgtcaaccaagggccagcctccccacgaaggggactgattaagctgttatgtgctctacctacaggtgcagtaaagaggatctgggctgaccaacagtgtcttccacagatacacttgctaattcacgcatggaagacccagagtgtatcactcccctcaactgctggactactgtgctgcaaactttgagtcagaatgatgagcttcagtcaggcatatcatggctcctgaacaggattttgagagcaagattctgtgcctccctcatcctgctgcagcctctcagtgcatctaggtgtttctgcttccattgtacatatctatcaaaataaaattgttataattaaacaaacaaataaatagataaatagatctggtggcaaatgagcagcaactcctccccactcccaacataagttaaagtttgagtttcagcaacagatgtaggatcagaaaacaaatgtttaatatgttctgttgcattagagcggtacaggttggcaagtccttagaaaccacctaattccaccccttcattttacagataagcaaactgaggcccattgaggcttattaccttcccaaaggttgtgcaactaaatctacagaggtcataaatccaggcaaatacgttgcttctgttttatatgcttaatttcttctgagcataaatttcaatggctactgaggcaatcaatagagaatatatcgaaatcagaagaaaataagtactgggagatggaaagatgcttcagcatccaaagaatggcactttggggaatgctgtcctcaaataaagcccaacctgataaacaggcttttatcagagaatttcaatttatcaaataataaccatgtagtatttctgagcattggagacagctgctatccagcaacccctaagcccagtctgtatggttttaagtcaaatgcatgagtgaaatatgatatatggagtttcaaactgggaggggtgatgtaggcttggtctcaggttgtaatagatcatgggtcaaatggccttgctggtcaaggtagatattttaactcagctccatcaaacataaacatcctacaaaaaagagaaagcacacagcaaattttcaggtctctctagactcaggtggtatcgttttagtctcatggagggaatggggtgcgtggcactttgacatatgggctgctctatggagcaccacctctaatggcaaacttagtgctaaatgctaccaattcggtctttgggagattttttaatgggaccacatctcagctcttacaaaagaaatcagtagcaaactaggattcactttaccaaaattttgttaaattcatctcttcattaatggaagaactttctatagagaggaaaagagaactacaatacagaggaggaaaggaaccaacaccccagccaataagcttccaggtagccttctaagcagttctggatgtctaaaatcttccagagaaagagacacagacatgcacattcacccaacaatcaactaggcattatttaggaacttgtgcagtagcttcagttttttctttgcaagtagacattgtgggtcatcaaaatagtcagctctcagtcattgtcttaccccttcatcacatcagaaagaattttatatacccctgaaagcacgacttccagagagcttacagcttaaagttctaaactggaagatcccaaacggaggctgacattatggaaaacttgcttagcttgacaaaggttgcccccataagggcatgccaaatgttcgcaagacttcagagcatcctaaggaatatgaaaaatcatctattttgcattagttacaatttaggccattttgacatagaatctagagactttacagacgggagagtcaggatctacatctgtgtgctgaggtggtcttgcgagaagtggatggttttgcaagaagaaccagagttgactcaaacttgggcctcatcatggagcagggttgggcctgtcaggatgtgtgactttgtgtaaaggaacacatctctggtgcatcttagcaaacattcaaaaaacagtaggaccaagatggcatcagataaacaagcagaaatactatcaataaatttccatcaaaggagagtaactggtgctcagttttgagcctaaaaggaaggaatctcctaatgacctcaagactacccaggagactcaagaagagagcaagctaacattgattggatgtgtactgtggagcagacatgacaccagatgcacaaaaagtgagatcccaggcctagtaatacacacacatgcacacaatacatggctgaataggagtactcccaaaatgctaaaataatatatataattatatctgggaagcaattaatggcgatttttcttttctttctttttttcttttttcttttttttcttttcttttttttttgagacagtgtctcgctctgttgcccaggctggagtgcagtggtgtgatcatggctccctgcagcttcaaccttccagttttaagctaacctcccacttcagcctcccaagtagctgggactacaggcatgtgccaccactcctggctcatttttgtatttcttgtagagactgggttttactatattgcccaggtttctcctttctttattatttcccacacttcccaaattttctccaatgagcatggattacttctataatcagaaagtgtattattaaataataacaataatgggacaagtcatcccaatgcaggtggaatcctggctacccatgatgcaaaaagaagcttgaaaacaacaatttcaccatatatcaactagacttacttaacattaaacaagcttcaaacccactttacccaaactctgaagaagcagtttgacagctatgtgctaagcaattctaggtgccaagaatacaaggatgagtgaagacatcaggccttatgaggaggggagaaaaaagaaatatgcgatttgtaaaaagttagcaatgcgatattacctcacacttgttagaatagttgttgtcaaaaatacaaaaaataacaagcattggaaaggatgtggagaaaggtgagcccttgtacactgtgggtgggaatggaaattagtacagccattatggaaaacagtatggaagttcctcaaaaaaattaaaaatagaagtaccatatgatctagcaatcccactactgggtatatatccaaaggaagtgaaatcagtatgtcaaagagattctgccctcccatgtttattgcagcactagtcacaaaagccaagatatggaatcaacctagtgtccattgataggtgaataaataaagatttgtgatatatatacacaatggaatactattcagcctttaaaaaggaagaaaatcctgtcatttgtgacaacatagatgaacctggaggacactatgcaaagtgaaataagtcaggcacagaaagacaaatactgcatgatctcacttctatgtggaatcttagaaagtcaaactcatagaaacagagagtagaatggtgattactggggactggggagtggcagggtggataggtgagatatggatcaaaggacataaaatttcagttcaacaggagagacaagcccaggaaatctattgtacatcataatgcctagagttaataacaatatattgaacaactgaaaattgctaagggggtaaattttaagtgttcttaccatccccccaagaaaatggtaagtatatgaggtaatacatatgttaaatagtttgatttagccactccacaatgtatacatacttcaaagcagtgttgtacatcataaatatatgtaccttttactaataaactttttaaaattaaaaattatcagtggctaaaaaactagggtgttaaatcatttctaaggtcatttttagcccaagcacttcatgattctaatgcaagaaaaagaataatgactgttctaacagaggaataaaccaaaatgctgtttagaagacagacgagagagtaatttagattatgggaatgggaaggggatgggcaatggtttcctggagaaggctacagtgatggtaaagctggattttgaaggatgactaggatttagataaatagacatggagaaagaggtataaaaagtaaagagggtggcgtggtggctcacacctgtaatcctagcactttgggaggccaaggtgggcagatcacaaggtcaggagtacgagaccggcctggccaatctggtgagaccccatctctactaaaaataccaggcatggtggcaggcgcctgtagtcccagctactcgggaagctgaggcaggagaatcgcttgaacctgagaggtggaggttgcagtgagctaagatcgcacaactgcactccagcctgggcaacagagtgagactccatctcaagaaaaaaaaaaaaaaaaaaaataaagaggtagagtaggaaaggtccgtgagtaaagggttctgggtttattccaggaacagcaagtaactattcaattagcaagccatgcctgggtcatggtatttcctgtgggcagcccccatatttagcatgatgtatgcagagtctgggtttaatgagactgcattcttgcactcagctatcacctcatctggagggggtgggaaatgggctgggagttctacaatggcaaggctttaggctatttttatcacactgcacaataggtgctctatttgattgacaaaggaataaccatgcatgaagcactatgacacactgctataaaagctgtgcacagggtgcataggtcacccattcctggcgtggggagaggggctggcacaggacaagtgagcttcctagagttgagtttgggagcatgggattcgatgtggaagccaagatggtgggtaaggagaggacgtttgagcagcagaattaatatgaagagcacagagaaaagtgaaagcttaatatataatgagaattgagaataccaccaacacagcagttgcctgtgctccaaagctgttggtgaagttatagtatggaatagtgagcaaaccactggactgagagttgagtgagctcctgcgggacactaagcaaagcaagaggcctaccctgctctaggcacctgccacatagtaggccttcacatattttatggcactgagtcagcacgatagctctaagtgataggtattattgttcctaatttagagatgagacaatcaaggttaagaaacttgtccaaaaatatacagcaaattggtggcagagttggaattccaactcagatttctccctaaaactcacattcttcacctacatgttcctagtataataataataatttttttaaaaaagatagactagattagctatggacccatttggccttgtgcaagaattccaaagatgtgatcttcctaaaccttcacctccaccatctctataatgttaggtgatgtcagttaacaagatctacacaatgcctctaacaagatctcatagtggagagacctttcttttgttaaggaaagaaagaaatgtatttcctaagaaatctcaaatttaaaatacaaacacatacaactatgaaagtaggttaagtatgaaactgaaatgtcatttgtatttctgtacttggagtcagatgacccctaacatgatgagcagagaaaaaacataaaataaccatgtcctggacacaagcagtagggccaccacctgtcagcaagagttaactatcgaatccaactgtgacctccattctaagaaaccccatctcagtcaggttggatgtaaacccactgctccaaacagagaaagcagtagccacctctccctccctggtttcatctttcatagctttactcatcaggtctgactcctgtgaatagcccgactactaatatggaaaccaaccccaccttccatctttgtagctggcacagtgtacacatatattgcctcccaacatccctgtgggttagtaagtcaaatattactatcacatgttagatgaccaagtcgaggcctagagaggacgcaagatacaaccagggaataagaaagacaatgttgtagctgggcttcaaacctttgtctttctgctcttaatcttgcactcacattatccaacaccatgggcagagacacaatccctcctccttccttccactctaggtcaatgaggcaacctccctaagtagacaatctggaatcaaagctgtcttctgcttttccaggagggaaaaaacgtgtgcttatctgaaatcagattgtcctagttgagggctaagagtgtacttgcatgagcatgaagcacacctgtttacattgtagtcagcatcccacacctggcttccctgggacttttaccctccgcagacagccttctctcactctgctagaatcatggctcattcactaattaaagggtattacacacttcattgcacatcagctaagagcttggaataagaaagcttatgctagagcatttgcactggagatgccactagatatgcttcatagaaaaagaaatacagagaaaagccatccccttgtgacatcccttcccccatacttaacttctctaataagtcagccaccgcacttaaagaaagaagtcacctagcatggtacaatcctagatagagcctcaaaaataagccaactggagagggatgcacagcagagaaaatgaataagagaaggcgggtcaagtggcttctccaacaaccacctgtccaggctctctgccctcttctggtatggcagcccaataagaaggatgcttatatcccaggccaaaaaaagacagagggacaaaggatgagttgggaggagtactcctcactacaaggtcttgagcaaactcagcatcatgttccctctagtaaaggctcagcattgctgcccactgtgcccagctggggccagagaccagcctccctgctggagcctcgttgggctgtcctggagtagatgctttttctgatactccctgaacaacttgaacagcagcactgaggctcacccccttttcaatgatggggaaggtcacacatagagggccagcctgaggaatggacactcaaatagattactcttgaacttgctgaggacagcagataatgacatgccactgacagagtagtaaatattatccataggcaatttcactatttgggaaacattacaaagaggtcaaaagctcaggcgaactttaaggcctgatcttaaagacctcttgggacctcagcaagtaaaaagatggtccaagtataaaacaatagcctggggtcaaaaaacatttacttctaaatggaacttagacatggattcagaagaagccaccagttggacatgcagtcaggaggaagctagagaactcaacccagagtctgctacttattacagtttctctctgtgtcaccctctgtgtcgtctgtgtgttccatgtgtgttcaggcagacagaggaacagctgagtgcatttccaagctgcacggtgcagtggtgaagccgagcgttgccaggcgctagaaagaacggggtggaatatagtgatggcttcagcctccaagaataaggcattttctctatctctcctcaagccacctaagacatcatttgtgcatgacatgttttaggatcctgtttgctgcatttagaagagcttccaatattactggtcccttctcccagctcagactggcttcctctttagcatacactactgccgattttgctgtgctcttcctcacaaggcttaaaagggataatacaaaacagctcctccaagaaacagagttctagcacacagactgcgagaggcaatgcccccggcactctgggctttttcagaatcagagatagccaacagcaattacagaggctacaggcagagactggttatggcattaaaagaacctcagatcaagaggctggtgaatccaagagggggtagggaatggatgcagcacaggaaaggtaagcaatgtcttcattaggcagaggaccctagacaagtgctggatcacaggtcagccccttcccaactgctatacctgctattcccaacttgcaattgcattttggctcaacgttctgagactcaaaagctctcaatcctccctaaggcagctatgggggaagcagccacactggacttctggagggtcccacagcccctgatacccagacgtgcctggcagcaaacagtagtcagcagctgctgtatgacctattatgccaagttatgcctagcagcccactaactggagaaccctggcagcaacagtgctcctctcgtcctttcctctctgcccctccagtaagccccatcctgaacgtaagccacatccccctccgcttttcctctttactcagctccacactcctcccccaggctttccattcccacagctgttcgccccctccctgcacccctcctcctgcatccacgtcgttaagtgattatacagagagaaaaccgagcctttgagtttcaagccaaagctcccagacaaggcagccgggactggttcaccctcacaggcatctccctgaccctcttgcacacgtgcctccgcccagaccctcctctctgcccaagcactctgaacatctcttggcttcaacctgccaacagatcagatggagccctggggtgcccggcctctcctctccccacatggagcttagaattcacacaaggaaaggaagcaaggagacttccacacctctgcagcatcacctgctccagcaagctcccaaagccaccggagccagccagactgcctgggccccacacccccttctctgacggctttagctccagcccagcccacaggatgcagtgcctgatgccacttccgagcagagagagacacacacgcacacgcacacgcacacacacacagaatgccacctcgtcaatgacaagctgttccaatcacacagctcggacaccaagcggaccggacaacggacagcccaggcctcctccctctgactgggaggaagccaactgagcacgtctggggaagtgatcccccaccgcaagccccccactcaccctccatatttgatctgacagcagtgctctatcctggccggtagccttccctgcaaccagctcgcacaactctgaccaactaccctcgtggccttcaggtgaggcactgctctctctcctgtcccaaagcacaaggaaaccccaaaccaagcaggagaccaccggcgcaccacttctccagaggaccagacagagtgagctgaaaaccaagtactcactgtggtgaagtcttggtggccgcactcctgccctttgaacttgcagtagagcatcatatccttcaggtcatggcccacacggtgcaggaactccagcatgctgaactgcttgggtttgtagtgcttgaagttggccttctgccgcagggcctccagcacggaggggtcagccagatgggggtccgggatctgcaggttgacatccagcagggccagcagctccccagcatggtacaggtcattggtggtgagcctggagaaccggaagccattcaggttacagagggtcacagctgggaagaccaggctttgagccaccacttcgtccaccttagtgacatgctggtaggagaagtagtaggacaccctctcagagctctccaccagcagcaggcccagagagcccacgaaggccactgcccacagcacacgccggatggtcagcggcccatacacgaagatgtggcggatgccatggagggtggaggtgttggcaaagatctggatgctagaaggttgcaggctgccctcactggggctttccttgaggtccatcgggaccccgtgcagttccgcaactggcttcaggttgatcgaatttcagagaagagctcccagtcctcgggctctgcttaaaccttgacgttcaggggagagaacgcaaggcaagcatcgcgccagatgctgtgagtttatcctgagagcccagccgcacgctgacaggggtgagtgtttatataaaacccattcaaactctagctcttgattttttccaggcgataaggagggctggttttatttagggagacaccaaggtgatgtggaagagatgtgggtgggaagggagagcttagccaatggaaataaagtcctcccccctacacacgccactagagacaagattaaaagcgagagcgagagagaaaatgcttaaa
